(19) United States
(12) Patent Application Publication
(10) Pub. No.: US 2008/0249040 A1
(43) Pub. Date: Oct. 9, 2008

(54) RNA interference mediated inhibition of sterol regulatory element binding protein 1 (SREBP1) gene expression using short interfering nucleic acid (siNA)

(75) Inventors: James McSwiggen, Boulder, CO (US); Vasant Jadhav, Longmont, CO (US); Narendra Vaish, Denver, CO (US); Roberto Guerciolini, Boulder, CO (US); Chandra Vargeese, Broomfield, CO (US)

Correspondence Address: MCDONNELL BOEHNEN HULBERT & BERGHOFF LLP, 300 S. WACKER DRIVE, 32ND FLOOR, CHICAGO, IL, 60606, US

(73) Assignee: Sirna Therapeutics, Inc., San Francisco, CA (US)

(21) Appl. No.: 11/488,374

(22) Filed: Jul. 18, 2006

Related U.S. Application Data
(63) Continuation-in-part of application No. 11/369,108, filed on Mar. 6, 2006.
Application No. 11/369,108 is a continuation-in-part of application No. 11/299,254, filed on Dec. 8, 2005.
Application No. 11/299,254 is a continuation-in-part of application No. 11/234,730, filed on Sep. 23, 2005.
Application No. 11/234,730 is a continuation-in-part of application No. 11/205,646, filed on Aug. 17, 2005.
Application No. 11/205,646 is a continuation-in-part of application No. 11/098,303, filed on Apr. 4, 2005, now abandoned.
Application No. 11/098,303 is a continuation-in-part of application No. 10/923,536, filed on Aug. 20, 2004.
Application No. 10/923,536 is a continuation-in-part of application No. PCT/US04/16390, filed on May 24, 2004.
Application No. PCT/US04/16390 is a continuation-in-part of application No. 10/826,966, filed on Apr. 16, 2004, now abandoned.
Application No. 10/826,966 is a continuation-in-part of application No. 10/757,803, filed on Jan. 14, 2004.
Application No. 10/757,803 is a continuation-in-part of application No. 10/720,448, filed on Nov. 24, 2003.
Application No. 10/720,448 is a continuation-in-part of application No. 10/693,059, filed on Oct. 23, 2003.
Application No. 10/693,059 is a continuation-in-part of application No. 10/444,853, filed on May 23, 2003.
Application No. 10/444,853 is a continuation-in-part of application No. PCT/US03/05346, filed on Feb. 20, 2003.
Application No. PCT/US03/05346 is a continuation-in-part of application No. PCT/US03/05028, filed on Feb. 20, 2003.
Application No. PCT/US03/05028 is a continuation-in-part of application No. PCT/US04/13456, filed on Apr. 30, 2004.
Application No. PCT/US04/13456 is a continuation-in-part of application No. 10/780,447, filed on Feb. 13, 2004.
Application No. 10/780,447 is a continuation-in-part of application No. 10/427,160, filed on Apr. 30, 2003.
Application No. 10/427,160 is a continuation-in-part of application No. PCT/US02/15876, filed on May 17, 2002.
Application No. PCT/US02/15876 is a continuation-in-part of application No. 10/727,780, filed on Dec. 3, 2003, now abandoned.
Application No. 10/727,780 is a continuation-in-part of application No. PCT/US05/04270, filed on Feb. 9, 2005.
Application No. PCT/US05/04270 is a continuation-in-part of application No. 11/353,630, filed on Feb. 14, 2006.
(60) Provisional application No. 60/358,580, filed on Feb. 20, 2002.
(60) Provisional application No. 60/358,580, filed on Feb. 20, 2002.
(60) Provisional application No. 60/363,124, filed on Mar. 11, 2002.
(60) Provisional application No. 60/363,124, filed on Mar. 11, 2002.
(60) Provisional application No. 60/386,782, filed on Jun. 6, 2002.
(60) Provisional application No. 60/386,782, filed on Jun. 6, 2002.
(60) Provisional application No. 60/406,784, filed on Aug. 29, 2002.
(60) Provisional application No. 60/406,784, filed on Aug. 29, 2002.
(60) Provisional application No. 60/408,378, filed on Sep. 5, 2002.
(60) Provisional application No. 60/408,378, filed on Sep. 5, 2002.
(60) Provisional application No. 60/409,293, filed on Sep. 9, 2002.
(60) Provisional application No. 60/409,293, filed on Sep. 9, 2002.
(60) Provisional application No. 60/440,129, filed on Jan. 15, 2003.
(60) Provisional application No. 60/440,129, filed on Jan. 15, 2003.
(60) Provisional application No. 60/292,217, filed on May 18, 2001.
(60) Provisional application No. 60/362,016, filed on Mar. 6, 2002.
(60) Provisional application No. 60/306,883, filed on Jul. 20, 2001.
(60) Provisional application No. 60/311,865, filed on Aug. 13, 2001.
(60) Provisional application No. 60/543,480, filed on Feb. 10, 2004.
(60) Provisional application No. 60/652,787, filed on Feb. 14, 2005.
(60) Provisional application No. 60/678,531, filed on May 6, 2005.
(60) Provisional application No. 60/703,946, filed on Jul. 29, 2005.
(60) Provisional application No. 60/737,024, filed on Nov. 15, 2005.

(51) Int. Cl. A61K 31/70; C07H 21/00; A61P 43/00

(52) U.S. Cl. 514/44; 536/23.1

(57) ABSTRACT

The present invention relates to compounds, compositions, and methods for the study, diagnosis, and treatment of traits, diseases and conditions that respond to the modulation of Sterol Regulatory Element-Binding Protein 1 (SREBP1) gene expression and/or activity. The present invention is also directed to compounds, compositions, and methods relating to traits, diseases and conditions that respond to the modulation of expression and/or activity of genes involved in Sterol Regulatory Element-Binding Protein 1 (SREBP1) gene expression pathways or other cellular processes that mediate the maintenance or development of such traits, diseases and conditions. Specifically, the invention relates to double stranded nucleic acid molecules including small nucleic acid molecules, such as short interfering nucleic acid (siNA), short interfering RNA (siRNA), double-stranded RNA (dsRNA), micro-RNA (miRNA), and short hairpin RNA (shRNA) molecules capable of mediating RNA interference (RNAi) against Sterol Regulatory Element-Binding Protein 1 (SREBP1) gene expression, including cocktails of such small nucleic acid molecules and lipid nanoparticle (LNP) formulations of such small nucleic acid molecules. The present invention also relates to small nucleic acid molecules, such as siNA, siRNA, and others that can inhibit the function of endogenous RNA molecules, such as endogenous micro-RNA (miRNA) (e.g, miRNA inhibitors) or endogenous short interfering RNA (siRNA), (e.g., siRNA inhibitors) or that can inhibit the function of RISC (e.g., RISC inhibitors), to modulate SREBP1 gene expression by interfering with the regulatory function of such endogenous RNAs or proteins associated with such endogenous RNAs (e.g., RISC), including cocktails of such small nucleic acid molecules and lipid nanoparticle (LNP) formulations of such small nucleic acid molecules. Such small nucleic acid molecules and are useful, for example, in providing compositions to prevent, inhibit, or reduce metabolic diseases traits and conditions, including but not limited to hyperlipidemia, hypercholesterolemia, cardiovascular disease, atherosclerosis, hypertension, diabetis (e.g., type I and/or type II diabetis), insulin resistance, obesity and/or other disease states, conditions, or traits associated with SREBP1 gene expression or activity in a subject or organism.

[0001] This application is a continuation-in-part of U.S. patent application Ser. No. 11/369,108 filed Mar. 6, 2006. This application is also a continuation-in-part of U.S. patent application Ser. No. 11/299,254, filed Dec. 8, 2005, which is a continuation-in-part of U.S. patent application Ser. No. 11/234,730, filed Sep. 23, 2005, which is a continuation-in-part of U.S. patent application Ser. No. 11/205,646, filed Aug. 17, 2005, which is a continuation-in-part of U.S. patent application Ser. No. 11/098,303, filed Apr. 4, 2005, which is a continuation-in-part of U.S. patent application Ser. No. 10/923,536, filed Aug. 20, 2004, which is a continuation-in-part of International Patent Application No. PCT/US04/16390, filed May 24, 2004, which is a continuation-in-part of U.S. patent application Ser. No. 10/826,966, filed Apr. 16, 2004, which is continuation-in-part of U.S. patent application Ser. No. 10/757,803, filed Jan. 14, 2004, which is a continuation-in-part of U.S. patent application Ser. No. 10/720,448, filed Nov. 24, 2003, which is a continuation-in-part of U.S. patent application Ser. No. 10/693,059, filed Oct. 23, 2003, which is a continuation-in-part of U.S. patent application Ser. No. 10/444,853, filed May 23, 2003, which is a continuation-in-part of International Patent Application No. PCT/US03/05346, filed Feb. 20, 2003, and a continuation-in-part of International Patent Application No. PCT/US03/05028, filed Feb. 20, 2003, both of which claim the benefit of U.S. Provisional Application No. 60/358,580 filed Feb. 20, 2002, U.S. Provisional Application No. 60/363,124 filed Mar. 11, 2002, U.S. Provisional Application No. 60/386,782 filed Jun. 6, 2002, U.S. Provisional Application No. 60/406,784 filed Aug. 29, 2002, U.S. Provisional Application No. 60/408,378 filed Sep. 5, 2002, U.S. Provisional Application No. 60/409,293 filed Sep. 9, 2002, and U.S. Provisional Application No. 60/440,129 filed Jan. 15, 2003. This application is also a continuation-in-part of International Patent Application No. PCT/US04/13456, filed Apr. 30, 2004, which is a continuation-in-part of U.S. patent application Ser. No. 10/780,447, filed Feb. 13, 2004, which is a continuation-in-part of U.S. patent application Ser. No. 10/427,160, filed Apr. 30, 2003, which is a continuation-in-part of International Patent Application No. PCT/US02/15876 filed May 17, 2002, which claims the benefit of U.S. Provisional Application No. 60/292,217, filed May 18, 2001, U.S. Provisional Application No. 60/362,016, filed Mar. 6, 2002, U.S. Provisional Application No. 60/306,883, filed Jul. 20, 2001, and U.S. Provisional Application No. 60/311,865, filed Aug. 13, 2001. This application is also a continuation-in-part of U.S. patent application Ser. No. 10/727,780 filed Dec. 3, 2003. This application is also a continuation-in-part of International Patent Application No. PCT/US05/04270, filed Feb. 9, 2005 which claims the benefit of U.S. Provisional Application No. 60/543,480, filed Feb. 10, 2004. This application is also a a continuation-in-part of U.S. patent application Ser. No. 11/353,630, filed Feb. 14, 2006, which claims the benefit of U.S. Provisional Patent Application No. 60/652,787 filed Feb. 14, 2005, U.S. Provisional Patent Application No. 60/678,531 filed May 6, 2005, U.S. Provisional Patent Application No. 60/703,946, filed Jul. 29, 2005, and U.S. Provisional Patent Application No. 60/737,024, filed Nov. 15, 2005. The instant application claims the benefit of all the listed applications, which are hereby incorporated by reference herein in their entireties, including the drawings.

### FIELD OF THE INVENTION

[0002] The present invention relates to compounds, compositions, and methods for the study, diagnosis, and treatment of traits, diseases and conditions that respond to the modulation of Sterol Regulatory Element-Binding Protein 1 (SREBP1) gene expression and/or activity. The present invention is also directed to compounds, compositions, and methods relating to traits, diseases and conditions that respond to the modulation of expression and/or activity of genes involved in Sterol Regulatory Element-Binding Protein 1 (SREBP1) gene expression pathways or other cellular processes that mediate the maintenance or development of such traits, diseases and conditions. Specifically, the invention relates to double stranded nucleic acid molecules including small nucleic acid molecules, such as short interfering nucleic acid (siNA), short interfering RNA (siRNA), double-stranded RNA (dsRNA), micro-RNA (miRNA), and short hairpin RNA (shRNA) molecules capable of mediating RNA interference (RNAi) against Sterol Regulatory Element-Binding Protein 1 (SREBP1) gene expression, including cocktails of such small nucleic acid molecules and lipid nanoparticle (LNP) formulations of such small nucleic acid molecules. The present invention also relates to small nucleic acid molecules, such as siNA, siRNA, and others that can inhibit the function of endogenous RNA molecules, such as endogenous micro-RNA (miRNA) (e.g, miRNA inhibitors) or endogenous short interfering RNA (siRNA), (e.g., siRNA inhibitors) or that can inhibit the function of RISC (e.g., RISC inhibitors), to modulate SREBP1 gene expression by interfering with the regulatory function of such endogenous RNAs or proteins associated with such endogenous RNAs (e.g., RISC), including cocktails of such small nucleic acid molecules and lipid nanoparticle (LNP) formulations of such small nucleic acid molecules. Such small nucleic acid molecules and are useful, for example, in providing compositions to prevent, inhibit, or reduce metabolic diseases traits and conditions, including but not limited to hyperlipidemia, hypercholesterolemia, cardiovascular disease, atherosclerosis, hypertension, diabetis (e.g., type I and/or type II diabetis), insulin resistance, obesity and/or other disease states, conditions, or traits associated with SREBP1 gene expression or activity in a subject or organism.

### BACKGROUND OF THE INVENTION

[0003] The following is a discussion of relevant art pertaining to RNAi. The discussion is provided only for understanding of the invention that follows. The summary is not an admission that any of the work described below is prior art to the claimed invention.

[0004] RNA interference refers to the process of sequence-specific post-transcriptional gene silencing in animals mediated by short interfering RNAs (siRNAs) (Zamore et al., 2000, Cell, 101, 25-33; Fire et al., 1998, Nature, 391, 806; Hamilton et al., 1999, Science, 286, 950-951; Lin et al., 1999, Nature, 402, 128-129; Sharp, 1999, Genes & Dev., 13:139-141; and Strauss, 1999, Science, 286, 886). The corresponding process in plants (Heifetz et al., International PCT Publication No. WO 99/61631) is commonly referred to as post-transcriptional gene silencing or RNA silencing and is also referred to as quelling in fungi. The process of post-transcriptional gene silencing is thought to be an evolutionarily-conserved cellular defense mechanism used to prevent the expression of foreign genes and is commonly shared by diverse flora and phyla (Fire et al., 1999, Trends Genet., 15, 358). Such protection from foreign gene expression may have evolved in response to the production of double-stranded RNAs (dsRNAs) derived from viral infection or from the random integration of transposon elements into a host genome via a cellular response that specifically destroys homologous single-stranded RNA or viral genomic RNA. The presence of dsRNA in cells triggers the RNAi response through a mechanism that has yet to be fully characterized. This mechanism appears to be different from other known mechanisms involving double stranded RNA-specific ribonucleases, such as the interferon response that results from dsRNA-mediated activation of protein kinase PKR and 2′,5′-oligoadenylate synthetase resulting in non-specific cleavage of mRNA by ribonuclease L (see for example U.S. Pat. Nos. 6,107,094; 5,898,031; Clemens et al., 1997, J. Interferon & Cytokine Res., 17, 503-524; Adah et al., 2001, Curr. Med. Chem., 8, 1189).

[0005] The presence of long dsRNAs in cells stimulates the activity of a ribonuclease III enzyme referred to as dicer (Bass, 2000, Cell, 101, 235; Zamore et al., 2000, Cell, 101, 25-33; Hammond et al., 2000, Nature, 404, 293). Dicer is involved in the processing of the dsRNA into short pieces of dsRNA known as short interfering RNAs (siRNAs) (Zamore et al., 2000, Cell, 101, 25-33; Bass, 2000, Cell, 101, 235; Berstein et al., 2001, Nature, 409, 363). Short interfering RNAs derived from dicer activity are typically about 21 to about 23 nucleotides in length and comprise about 19 base pair duplexes (Zamore et al., 2000, Cell, 101, 25-33; Elbashir et al., 2001, Genes Dev., 15, 188). Dicer has also been implicated in the excision of 21- and 22-nucleotide small temporal RNAs (stRNAs) from precursor RNA of conserved structure that are implicated in translational control (Hutvagner et al., 2001, Science, 293, 834). The RNAi response also features an endonuclease complex, commonly referred to as an RNA-induced silencing complex (RISC), which mediates cleavage of single-stranded RNA having sequence complementary to the antisense strand of the siRNA duplex. Cleavage of the target RNA takes place in the middle of the region complementary to the antisense strand of the siRNA duplex (Elbashir et al., 2001, Genes Dev., 15, 188).

[0006] RNAi has been studied in a variety of systems. Fire et al., 1998, Nature, 391, 806, were the first to observe RNAi in C. elegans. Bahramian and Zarbl, 1999, Molecular and Cellular Biology, 19, 274-283 and Wianny and Goetz, 1999, Nature Cell Biol., 2, 70, describe RNAi mediated by dsRNA in mammalian systems. Hammond et al., 2000, Nature, 404, 293, describe RNAi in Drosophila cells transfected with dsRNA. Elbashir et al., 2001, Nature, 411, 494 and Tuschl et al., International PCT Publication No. WO 01/75164, describe RNAi induced by introduction of duplexes of synthetic 21-nucleotide RNAs in cultured mammalian cells including human embryonic kidney and HeLa cells. Recent work in Drosophila embryonic lysates (Elbashir et al., 2001, EMBO J., 20, 6877 and Tuschl et al., International PCT Publication No. WO 01/75164) has revealed certain requirements for siRNA length, structure, chemical composition, and sequence that are essential to mediate efficient RNAi activity. These studies have shown that 21-nucleotide siRNA duplexes are most active when containing 3′-terminal dinucleotide overhangs. Furthermore, complete substitution of one or both siRNA strands with 2′-deoxy (2′-H) or 2′-O-methyl nucleotides abolishes RNAi activity, whereas substitution of the 3′-terminal siRNA overhang nucleotides with 2′-deoxy nucleotides (2′-H) was shown to be tolerated. Single mismatch sequences in the center of the siRNA duplex were also shown to abolish RNAi activity. In addition, these studies also indicate that the position of the cleavage site in the target RNA is defined by the 5′-end of the siRNA guide sequence rather than the 3′-end of the guide sequence (Elbashir et al., 2001, EMBO J., 20, 6877). Other studies have indicated that a 5′-phosphate on the target-complementary strand of a siRNA duplex is required for siRNA activity and that ATP is utilized to maintain the 5′-phosphate moiety on the siRNA (Nykanen et al., 2001, Cell, 107, 309).

[0007] Studies have shown that replacing the 3′-terminal nucleotide overhanging segments of a 21-mer siRNA duplex having two-nucleotide 3′-overhangs with deoxyribonucleotides does not have an adverse effect on RNAi activity. Replacing up to four nucleotides on each end of the siRNA with deoxyribonucleotides has been reported to be well tolerated, whereas complete substitution with deoxyribonucleotides results in no RNAi activity (Elbashir et al., 2001, EMBO J., 20, 6877 and Tuschl et al., International PCT Publication No. WO 01/75164). In addition, Elbashir et al., supra, also report that substitution of siRNA with 2′-O-methyl nucleotides completely abolishes RNAi activity. Li et al., International PCT Publication No. WO 00/44914, and Beach et al., International PCT Publication No. WO 01/68836 preliminarily suggest that siRNA may include modifications to either the phosphate-sugar backbone or the nucleoside to include at least one of a nitrogen or sulfur heteroatom, however, neither application postulates to what extent such modifications would be tolerated in siRNA molecules, nor provides any further guidance or examples of such modified siRNA. Kreutzer et al., Canadian Patent Application No. 2,359,180, also describe certain chemical modifications for use in dsRNA constructs in order to counteract activation of double-stranded RNA-dependent protein kinase PKR, specifically 2′-amino or 2′-O-methyl nucleotides, and nucleotides containing a 2′-O or 4′-C methylene bridge. However, Kreutzer et al. similarly fails to provide examples or guidance as to what extent these modifications would be tolerated in dsRNA molecules.

[0008] Parrish et al., 2000, Molecular Cell, 6, 1077-1087, tested certain chemical modifications targeting the unc-22 gene in C. elegans using long (>25 nt) siRNA transcripts. The authors describe the introduction of thiophosphate residues into these siRNA transcripts by incorporating thiophosphate nucleotide analogs with T7 and T3 RNA polymerase and observed that RNAs with two phosphorothioate modified bases also had substantial decreases in effectiveness as RNAi. Further, Parrish et al. reported that phosphorothioate modification of more than two residues greatly destabilized the RNAs in vitro such that interference activities could not be assayed. Id. at 1081. The authors also tested certain modifications at the 2′-position of the nucleotide sugar in the long siRNA transcripts and found that substituting deoxynucleotides for ribonucleotides produced a substantial decrease in interference activity, especially in the case of Uridine to Thymidine and/or Cytidine to deoxy-Cytidine substitutions. Id. In addition, the authors tested certain base modifications, including substituting, in sense and antisense strands of the siRNA, 4-thiouracil, 5-bromouracil, 5-iodouracil, and 3-(aminoallyl)uracil for uracil, and inosine for guanosine. Whereas 4-thiouracil and 5-bromouracil substitution appeared to be tolerated, Parrish reported that inosine produced a substantial decrease in interference activity when incorporated in either strand. Parrish also reported that incorporation of 5-iodouracil and 3-(aminoallyl)uracil in the antisense strand resulted in a substantial decrease in RNAi activity as well.

[0009] The use of longer dsRNA has been described. For example, Beach et al., International PCT Publication No. WO 01/68836, describes specific methods for attenuating gene expression using endogenously-derived dsRNA. Tuschl et al., International PCT Publication No. WO 01/75164, describe a Drosophila in vitro RNAi system and the use of specific siRNA molecules for certain functional genomic and certain therapeutic applications; although Tuschl, 2001, Chem. Biochem., 2, 239-245, doubts that RNAi can be used to cure genetic diseases or viral infection due to the danger of activating interferon response. Li et al., International PCT Publication No. WO 00/44914, describe the use of specific long (141 bp-488 bp) enzymatically synthesized or vector expressed dsRNAs for attenuating the expression of certain target genes. Zernicka-Goetz et al., International PCT Publication No. WO 01/36646, describe certain methods for inhibiting the expression of particular genes in mammalian cells using certain long (550 bp-714 bp), enzymatically synthesized or vector expressed dsRNA molecules. Fire et al., International PCT Publication No. WO 99/32619, describe particular methods for introducing certain long dsRNA molecules into cells for use in inhibiting gene expression in nematodes. Plaetinck et al., International PCT Publication No. WO 00/01846, describe certain methods for identifying specific genes responsible for conferring a particular phenotype in a cell using specific long dsRNA molecules. Mello et al., International PCT Publication No. WO 01/29058, describe the identification of specific genes involved in dsRNA-mediated RNAi. Pachuck et al., International PCT Publication No. WO 00/63364, describe certain long (at least 200 nucleotide) dsRNA constructs. Deschamps Depaillette et al., International PCT Publication No. WO 99/07409, describe specific compositions consisting of particular dsRNA molecules combined with certain anti-viral agents. Waterhouse et al., International PCT Publication No. 99/53050 and 1998, PNAS, 95, 13959-13964, describe certain methods for decreasing the phenotypic expression of a nucleic acid in plant cells using certain dsRNAs. Driscoll et al., International PCT Publication No. WO 01/49844, describe specific DNA expression constructs for use in facilitating gene silencing in targeted organisms.

[0010] Others have reported on various RNAi and gene-silencing systems. For example, Parrish et al., 2000, Molecular Cell, 6, 1077-1087, describe specific chemically-modified dsRNA constructs targeting the unc-22 gene of C. elegans. Grossniklaus, International PCT Publication No. WO 01/38551, describes certain methods for regulating polycomb gene expression in plants using certain dsRNAs. Churikov et al., International PCT Publication No. WO 01/42443, describe certain methods for modifying genetic characteristics of an organism using certain dsRNAs. Cogoni et al, International PCT Publication No. WO 01/53475, describe certain methods for isolating a Neurospora silencing gene and uses thereof. Reed et al., International PCT Publication No. WO 01/68836, describe certain methods for gene silencing in plants. Honer et al., International PCT Publication No. WO 01/70944, describe certain methods of drug screening using transgenic nematodes as Parkinson's Disease models using certain dsRNAs. Deak et al., International PCT Publication No. WO 01/72774, describe certain Drosophila-derived gene products that may be related to RNAi in Drosophila. Arndt et al., International PCT Publication No. WO 01/92513 describe certain methods for mediating gene suppression by using factors that enhance RNAi. Tuschl et al., International PCT Publication No. WO 02/44321, describe certain synthetic siRNA constructs. Pachuk et al., International PCT Publication No. WO 00/63364, and Satishchandran et al., International PCT Publication No. WO 01/04313, describe certain methods and compositions for inhibiting the function of certain polynucleotide sequences using certain long (over 250 bp), vector expressed dsRNAs. Echeverri et al., International PCT Publication No. WO 02/38805, describe certain C. elegans genes identified via RNAi. Kreutzer et al., International PCT Publications Nos. WO 02/055692, WO 02/055693, and EP 1144623 B1 describes certain methods for inhibiting gene expression using dsRNA. Graham et al., International PCT Publications Nos. WO 99/49029 and WO 01/70949, and AU 4037501 describe certain vector expressed siRNA molecules. Fire et al., U.S. Pat. No. 6,506,559, describe certain methods for inhibiting gene expression in vitro using certain long dsRNA (299 bp-1033 bp) constructs that mediate RNAi. Martinez et al., 2002, Cell, 110, 563-574, describe certain single stranded siRNA constructs, including certain 5′-phosphorylated single stranded siRNAs that mediate RNA interference in Hela cells. Harborth et al., 2003, Antisense & Nucleic Acid Drug Development, 13, 83-105, describe certain chemically and structurally modified siRNA molecules. Chiu and Rana, 2003, RNA, 9, 1034-1048, describe certain chemically and structurally modified siRNA molecules. Woolf et al., International PCT Publication Nos. WO 03/064626 and WO 03/064625 describe certain chemically modified dsRNA constructs. Hornung et al., 2005, Nature Medicine, 11, 263-270, describe the sequence-specific potent induction of IFN-alpha by short interfering RNA in plasmacytoid dendritic cells through TLR7. Judge et al., 2005, Nature Biotechnology, Published online: 20 Mar. 2005, describe the sequence-dependent stimulation of the mammalian innate immune response by synthetic siRNA. Yuki et al., International PCT Publication Nos. WO 05/049821 and WO 04/048566, describe certain methods for designing short interfering RNA sequences and certain short interfering RNA sequences with optimized activity. Saigo et al., US Patent Application Publication No. US20040539332, describe certain methods of designing oligo- or polynucleotide sequences, including short interfering RNA sequences, for achieving RNA interference. Tei et al., International PCT Publication No. WO 03/044188, describe certain methods for inhibiting expression of a target gene, which comprises transfecting a cell, tissue, or individual organism with a double-stranded polynucleotide comprising DNA and RNA having a substantially identical nucleotide sequence with at least a partial nucleotide sequence of the target gene.

[0011] Mattick, 2005, Science, 309, 1527-1528; Clayerie, 2005, Science, 309, 1529-1530; Sethupathy et al., 2006, RNA, 12, 192-197; and Czech, 2006 NEJM, 354, 11: 1194-1195; Hutvagner et al., US 20050227256, and Tuschl et al., US 20050182005, all describe antisense molecules that can inhibit miRNA function via steric blocking and are all incorporated by reference herein in their entirety.

### SUMMARY OF THE INVENTION

[0012] This invention relates to compounds, compositions, and methods useful for modulating the expression of Sterol Regulatory Element-Binding Protein 1 (SREBP1) genes, such as those SREBP1 genes associated with the development or maintenance of metabolic diseases traits and conditions, including but not limited to hyperlipidemia, hypercholesterolemia, cardiovascular disease, atherosclerosis, hypertension, diabetis (e.g., type I and/or type II diabetis), insulin resistance, obesity and/or any other diseases, traits, and conditions that are related to SREBP1 gene expression or activity, by RNA interference (RNAi) using short interfering nucleic acid (siNA) molecules. This invention also relates to compounds, compositions, and methods useful for modulating the expression and activity of other genes involved in pathways of SREBP1 gene expression and/or activity by RNA interference (RNAi) using small nucleic acid molecules. In particular, the instant invention features small nucleic acid molecules, such as short interfering nucleic acid (siNA), short interfering RNA (siRNA), double-stranded RNA (dsRNA), micro-RNA (miRNA), and short hairpin RNA (shRNA) molecules and methods used to modulate the expression of SREBP1 genes and/or other genes involved in pathways of SREBP1 gene expression and/or activity.

[0013] The instant invention also relates to small nucleic acid molecules, such as siNA, siRNA, and others that can inhibit the function of endogenous RNA molecules, such as endogenous micro-RNA (miRNA) (e.g, miRNA inhibitors) or endogenous short interfering RNA (siRNA), (e.g., siRNA inhibitors) or that can inhibit the function of RISC (e.g., RISC inhibitors), to modulate SREBP1 gene expression by interfering with the regulatory function of such endogenous RNAs or proteins associated with such endogenous RNAs (e.g., RISC). Such molecules are collectively referred to herein as RNAi inhibitors.

[0014] A siNA or RNAi inhibitor of the invention can be unmodified or chemically-modified. A siNA or RNAi inhibitor of the instant invention can be chemically synthesized, expressed from a vector or enzymatically synthesized. The instant invention also features various chemically-modified synthetic short interfering nucleic acid (siNA) molecules capable of modulating target gene expression or activity in cells by RNA interference (RNAi). The instant invention also features various chemically-modified synthetic short nucleic acid (siNA) molecules capable of modulating RNAi activity in cells by interacting with miRNA, siRNA, or RISC, and hence down regulating or inhibiting RNA interference (RNAi), translational inhibition, or transcriptional silencing in a cell or organism. The use of chemically-modified siNA and/or RNAi inhibitors improves various properties of native siNA molecules and/or RNAi inhibitors through increased resistance to nuclease degradation in vivo and/or through improved cellular uptake. Further, contrary to earlier published studies, siNA molecules of the invention having multiple chemical modifications, including fully modified siNA, retains its RNAi activity. Therefore, Applicant teaches herein chemically modified siRNA that retains or improves upon the activity of native siRNA. The siNA molecules of the instant invention provide useful reagents and methods for a variety of therapeutic, prophylactic, veterinary, diagnostic, target validation, genomic discovery, genetic engineering, and pharmacogenomic applications.

[0015] In one embodiment, the invention features one or more siNA molecules and/or RNAi inhibitors and methods that independently or in combination modulate the expression of gene(s) encoding Sterol Regulatory Element-Binding Protein 1 (SREBP1) and/or SREBP1 pathway genes, such as genes encoding sequences comprising those sequences referred to by GenBank Accession Nos. shown in Table I, referred to herein generally as “SREBP1”. The description below of the various aspects and embodiments of the invention is provided with reference to exemplary Sterol Regulatory Element-Binding Protein 1 (SREBP1) gene referred to herein generally as SREBP1, but also known as Sterol Regulatory Element-Binding Transcription Factor 1 or SREBF1. The present invention is also directed to compounds, compositions, and methods relating to traits, diseases and conditions that respond to the modulation of expression and/or activity of genes involved in Sterol Regulatory Element-Binding Protein 1 (SREBP1) gene expression pathways or other cellular processes that mediate the maintenance or development of such traits, diseases and conditions, including Sterol Regulatory Element-Binding Protein 2 (SREBP2), also referred to as Sterol Regulatory Element-Binding Transcription Factor 2 or SREBF2. However, such reference is meant to be exemplary only and the various aspects and embodiments of the invention are also directed to other genes that express alternate SREBP1 and SREBP2 genes, such as mutant SREBP1 and SREBP2 genes, splice variants of SREBP1 and SREBP2 genes, SREBP1 and SREBP2 variants from species to species or subject to subject, and other SREBP1 and SREBP2 pathway genes including certain genes described in PCT/US03/05028 and U.S. Ser. No. 10/923,536, both incorporated by reference herein. Such additional genes can be analyzed for target sites using the methods described herein for exemplary SREBP1 and SREBP2 genes and sequences herein. Thus, the modulation and the effects of such modulation of the other genes can be performed as described herein. In other words, the term “SREBP1” as it is defined herein below and recited in the described embodiments, is meant to encompass genes associated with the development and/or maintenance of diseases, traits and conditions herein, such as genes which encode SREBP1 and SREBP2 polypeptides, SREBP1 and SREBP2 regulatory polynucleotides (e.g., SREBP1 and SREBP2 miRNAs and siRNAs), mutant SREBP1 and SREBP2 genes, and splice variants of SREBP1 and SREBP2 genes, as well as other genes involved in SREBP1 and SREBP2 pathways of gene expression and/or activity. Thus, each of the embodiments described herein with reference to the term “SREBP1” are applicable to all of the protein, peptide, polypeptide, and/or polynucleotide molecules covered by the term “SREBP1”, as that term is defined herein. Comprehensively, such gene targets are also referred to herein generally as “target” sequences.

[0016] In one embodiment, the invention features a composition comprising two or more different siNA molecules and/or RNAi inhibitors of the invention (e.g., siNA, duplex forming siNA, or multifunctional siNA or any combination thereof) targeting different polynucleotide targets, such as different regions of SREBP1 and SREBP2 RNA or DNA (e.g., two different target sites such as provided herein or any combination of SREBP1 and SREBP2 targets or SREBP1 and SREBP2 pathway targets, e.g. PCSK9) or both coding and non-coding targets. Such pools of siNA molecules can provide increased therapeutic effect.

[0017] In one embodiment, the invention features a pool of two or more different siNA molecules of the invention (e.g., siNA, duplex forming siNA, or multifunctional siNA or any combination thereof) that have specificity for different polynucleotide targets, such as different regions of SREBP1 and SREBP2 RNA or DNA (e.g., two different target sites herein or any combination of SREBP1 and SREBP2 targets or SREBP1 and SREBP2 pathway targets, e.g. PCSK9) or both coding and non-coding targets, wherein the pool comprises siNA molecules targeting about 2, 3, 4, 5, 6, 7, 8, 9, 10 or more different SREBP1 and SREBP2 targets.

[0018] Due to the potential for sequence variability of the SREBP1 genome across different organisms or different subjects, selection of siNA molecules for broad therapeutic applications likely involve the conserved regions of the SREBP1 gene. In one embodiment, the present invention relates to siNA molecules and/or RNAi inhibitors that target conserved regions of the SREBP1 genome or regions that are conserved across different SREBP1 targets. siNA molecules and/or RNAi inhibitors designed to target conserved regions of various SREBP1 targets enable efficient inhibition of SREBP1 target gene expression in diverse patient populations.

[0019] In one embodiment, the invention features a double stranded nucleic acid molecule, such as an siNA molecule, where one of the strands comprises nucleotide sequence having complementarity to a predetermined nucleotide sequence in a SREBP1 target nucleic acid molecule, or a portion thereof. The predetermined nucleotide sequence can be a nucleotide SREBP1 target sequence, such as a sequence described herein or known in the art. In another embodiment, the predetermined nucleotide sequence is a SREBP1 target sequence or SREBP1 pathway target sequence as is known in the art.

[0020] In one embodiment, the invention features a double-stranded short interfering nucleic acid (siNA) molecule that down-regulates expression of a SREBP1 target gene or that directs cleavage of a SREBP1 target RNA, wherein said siNA molecule comprises about 15 to about 28 base pairs.

[0021] In one embodiment, the invention features a double-stranded short interfering nucleic acid (siNA) molecule that directs cleavage of a SREBP1 target RNA, wherein said siNA molecule comprises about 15 to about 28 base pairs.

[0022] In one embodiment, the invention features a double stranded short interfering nucleic acid (siNA) molecule that directs cleavage of a SREBP1 target RNA via RNA interference (RNAi), wherein the double stranded siNA molecule comprises a first strand and a second strand, each strand of the siNA molecule is about 18 to about 28 (e.g., about 18, 19, 20, 21, 22, 23, 24, 25, 26, 27, or 28) nucleotides in length, the first strand of the siNA molecule comprises nucleotide sequence having sufficient complementarity to the SREBP1 target RNA for the siNA molecule to direct cleavage of the SREBP1 target RNA via RNA interference, and the second strand of said siNA molecule comprises nucleotide sequence that is complementary to the first strand. In one specific embodiment, for example, each strand of the siNA molecule is about 18 to about 27 nucleotides in length.

[0023] In one embodiment, the invention features a double stranded short interfering nucleic acid (siNA) molecule that directs cleavage of a SREBP1 target RNA via RNA interference (RNAi), wherein the double stranded siNA molecule comprises a first strand and a second strand, each strand of the siNA molecule is about 18 to about 23 (e.g., about 18, 19, 20, 21, 22, or 23) nucleotides in length, the first strand of the siNA molecule comprises nucleotide sequence having sufficient complementarity to the SREBP1 target RNA for the siNA molecule to direct cleavage of the SREBP1 target RNA via RNA interference, and the second strand of said siNA molecule comprises nucleotide sequence that is complementary to the first strand.

[0024] In one embodiment, the invention features a chemically synthesized double stranded short interfering nucleic acid (siNA) molecule that directs cleavage of a SREBP1 target RNA via RNA interference (RNAi), wherein each strand of the siNA molecule is about 18 to about 28 nucleotides in length; and one strand of the siNA molecule comprises nucleotide sequence having sufficient complementarity to the SREBP1 target RNA for the siNA molecule to direct cleavage of the SREBP1 target RNA via RNA interference.

[0025] In one embodiment, the invention features a chemically synthesized double stranded short interfering nucleic acid (siNA) molecule that directs cleavage of a SREBP1 target RNA via RNA interference (RNAi), wherein each strand of the siNA molecule is about 18 to about 23 nucleotides in length; and one strand of the siNA molecule comprises nucleotide sequence having sufficient complementarity to the SREBP1 target RNA for the siNA molecule to direct cleavage of the SREBP1 target RNA via RNA interference.

[0026] In one embodiment, the invention features a siNA molecule that down-regulates expression of a SREBP1 target gene or that directs cleavage of a SREBP1 target RNA, for example, wherein the SREBP1 target gene or RNA comprises protein encoding sequence. In one embodiment, the invention features a siNA molecule that down-regulates expression of a SREBP1 target gene or that directs cleavage of a SREBP1 target RNA, for example, wherein the SREBP1 target gene or RNA comprises non-coding sequence or regulatory elements involved in SREBP1 target gene expression (e.g., non-coding RNA, miRNA, stRNA etc.).

[0027] In one embodiment, a siNA of the invention is used to inhibit the expression of SREBP1 target genes or a SREBP1 target gene family (e.g., SREBP1 and SREBP2), wherein the genes or gene family sequences share sequence homology. Such homologous sequences can be identified as is known in the art, for example using sequence alignments. siNA molecules can be designed to target such homologous sequences, for example using perfectly complementary sequences or by incorporating non-canonical base pairs, for example mismatches and/or wobble base pairs, that can provide additional SREBP1 target sequences. In instances where mismatches are identified, non-canonical base pairs (for example, mismatches and/or wobble bases) can be used to generate siNA molecules that SREBP1 target more than one gene sequence. In a non-limiting example, non-canonical base pairs such as UU and CC base pairs are used to generate siNA molecules that are capable of SREBP1 targeting sequences for differing polynucleotide SREBP1 targets that share sequence homology. As such, one advantage of using siNAs of the invention is that a single siNA can be designed to include nucleic acid sequence that is complementary to the nucleotide sequence that is conserved between the homologous genes. In this approach, a single siNA can be used to inhibit expression of more than one gene instead of using more than one siNA molecule to target the different genes.

[0028] In one embodiment, the invention features a siNA molecule having RNAi activity against SREBP1 target RNA (e.g., coding or non-coding RNA), wherein the siNA molecule comprises a sequence complementary to any RNA sequence, such as those sequences having GenBank Accession Nos. shown in Table I herein, or in PCT/US03/05028 and U.S. Ser. No. 10/923,536, both incorporated by reference herein. In another embodiment, the invention features a siNA molecule having RNAi activity against SREBP1 target RNA, wherein the siNA molecule comprises a sequence complementary to an RNA having variant encoding sequence, for example other mutant genes known in the art to be associated with the maintenance and/or development of diseases, traits, disorders, and/or conditions described herein or otherwise known in the art. Chemical modifications as shown in Table IV or otherwise described herein can be applied to any siNA construct of the invention. In another embodiment, a siNA molecule of the invention includes a nucleotide sequence that can interact with nucleotide sequence of a SREBP1 target gene and thereby mediate silencing of SREBP1 target gene expression, for example, wherein the siNA mediates regulation of SREBP1 target gene expression by cellular processes that modulate the chromatin structure or methylation patterns of the SREBP1 target gene and prevent transcription of the SREBP1 target gene.

[0029] In one embodiment, siNA molecules of the invention are used to down regulate or inhibit the expression of proteins arising from haplotype polymorphisms that are associated with a trait, disease or condition in a subject or organism. Analysis of genes, or protein or RNA levels can be used to identify subjects with such polymorphisms or those subjects who are at risk of developing traits, conditions, or diseases described herein. These subjects are amenable to treatment, for example, treatment with siNA molecules of the invention and any other composition useful in treating diseases related to target gene expression. As such, analysis of protein or RNA levels can be used to determine treatment type and the course of therapy in treating a subject. Monitoring of protein or RNA levels can be used to predict treatment outcome and to determine the efficacy of compounds and compositions that modulate the level and/or activity of certain proteins associated with a trait, disorder, condition, or disease.

[0030] In one embodiment of the invention a siNA molecule comprises an antisense strand comprising a nucleotide sequence that is complementary to a nucleotide sequence or a portion thereof encoding a SREBP1 target protein. The siNA further comprises a sense strand, wherein said sense strand comprises a nucleotide sequence of a SREBP1 target gene or a portion thereof.

[0031] In another embodiment, a siNA molecule comprises an antisense region comprising a nucleotide sequence that is complementary to a nucleotide sequence encoding a SREBP1 target protein or a portion thereof. The siNA molecule further comprises a sense region, wherein said sense region comprises a nucleotide sequence of a SREBP1 target gene or a portion thereof.

[0032] In another embodiment, the invention features a siNA molecule comprising nucleotide sequence, for example, nucleotide sequence in the antisense region of the siNA molecule that is complementary to a nucleotide sequence or portion of sequence of a SREBP1 target gene. In another embodiment, the invention features a siNA molecule comprising a region, for example, the antisense region of the siNA construct, complementary to a sequence comprising a SREBP1 target gene sequence or a portion thereof.

[0033] In one embodiment, the sense region or sense strand of a siNA molecule of the invention is complementary to that portion of the antisense region or antisense strand of the siNA molecule that is complementary to a SREBP1 target polynucleotide sequence.

[0034] In yet another embodiment, the invention features a siNA molecule comprising a sequence, for example, the antisense sequence of the siNA construct, complementary to a sequence or portion of sequence comprising sequence represented by GenBank Accession Nos. shown in Table I and in PCT/US03/05028 and U.S. Ser. No. 10/923,536, both incorporated by reference herein. Chemical modifications in Tables III and IV and described herein can be applied to any siNA construct of the invention. LNP formulations described in Table VI can be applied to any siNA molecule or combination of siNA molecules herein.

[0035] In one embodiment of the invention a siNA molecule comprises an antisense strand having about 15 to about 30 (e.g., about 15, 16, 17, 18, 19, 20, 21, 22, 23, 24, 25, 26, 27, 28, 29, or 30) nucleotides, wherein the antisense strand is complementary to a SREBP1 target RNA sequence or a portion thereof, and wherein said siNA further comprises a sense strand having about 15 to about 30 (e.g., about 15, 16, 17, 18, 19, 20, 21, 22, 23, 24, 25, 26, 27, 28, 29, or 30) nucleotides, and wherein said sense strand and said antisense strand are distinct nucleotide sequences where at least about 15 nucleotides in each strand are complementary to the other strand.

[0036] In one embodiment, a siNA molecule of the invention (e.g., a double stranded nucleic acid molecule) comprises an antisense (guide) strand having about 15 to about 30 (e.g., about 15, 16, 17, 18, 19, 20, 21, 22, 23, 24, 25, 26, 27, 28, 29, or 30) nucleotides that are complementary to a RNA sequence of SREBP1 or a portion thereof. In one embodiment, at least 15 nucleotides (e.g., 15, 16, 17, 18, 19, 20, 21, 22, 23, 24, 25, 26, 27, 28, 29, or 30 nucleotides) of a SREBP1 RNA sequence are complementary to the antisense (guide) strand of a siNA molecule of the invention.

[0037] In one embodiment, a siNA molecule of the invention (e.g., a double stranded nucleic acid molecule) comprises a sense (passenger) strand having about 15 to about 30 (e.g., about 15, 16, 17, 18, 19, 20, 21, 22, 23, 24, 25, 26, 27, 28, 29, or 30) nucleotides that comprise sequence of a SREBP1 RNA or a portion thereof. In one embodiment, at least 15 nucleotides (e.g., about 15, 16, 17, 18, 19, 20, 21, 22, 23, 24, 25, 26, 27, 28, 29, or 30) nucleotides of a SREBP1 RNA sequence comprise the sense (passenger) strand of a siNA molecule of the invention.

[0038] In another embodiment of the invention a siNA molecule of the invention comprises an antisense region having about 15 to about 30 (e.g., about 15, 16, 17, 18, 19, 20, 21, 22, 23, 24, 25, 26, 27, 28, 29, or 30) nucleotides, wherein the antisense region is complementary to a SREBP1 target DNA sequence, and wherein said siNA further comprises a sense region having about 15 to about 30 (e.g., about 15, 16, 17, 18, 19, 20, 21, 22, 23, 24, 25, 26, 27, 28, 29, or 30) nucleotides, wherein said sense region and said antisense region are comprised in a linear molecule where the sense region comprises at least about 15 nucleotides that are complementary to the antisense region.

[0039] In one embodiment, a siNA molecule of the invention has RNAi activity that modulates expression of RNA encoded by a SREBP1 gene. Because SREBP1 genes can share some degree of sequence homology with each other, siNA molecules can be designed to target a class of SREBP1 genes by selecting sequences that are either shared amongst different SREBP1 targets or alternatively that are unique for a specific SREBP1 target. Therefore, in one embodiment, the siNA molecule can be designed to target conserved regions of SREBP1 polynucleotide sequences having homology among several SREBP1 gene variants so as to target a class of SREBP1 genes with one siNA molecule. Accordingly, in one embodiment, the siNA molecule of the invention modulates the expression of one or more SREBP1 isoforms or variants in a subject or organism. In another embodiment, the siNA molecule can be designed to target a sequence that is unique to a specific SREBP1 polynucleotide sequence (e.g., a single SREBP1 isoform or SREBP1 single nucleotide polymorphism (SNP)) due to the high degree of specificity that the siNA molecule requires to mediate RNAi activity.

[0040] In one embodiment, nucleic acid molecules of the invention that act as mediators of the RNA interference gene silencing response are double-stranded nucleic acid molecules. In another embodiment, the siNA molecules of the invention consist of duplex nucleic acid molecules containing about 15 to about 30 base pairs between oligonucleotides comprising about 15 to about 30 (e.g., about 15, 16, 17, 18, 19, 20, 21, 22, 23, 24, 25, 26, 27, 28, 29, or 30) nucleotides. In yet another embodiment, siNA molecules of the invention comprise duplex nucleic acid molecules with overhanging ends of about 1 to about 3 (e.g., about 1, 2, or 3) nucleotides, for example, about 21-nucleotide duplexes with about 19 base pairs and 3′-terminal mononucleotide, dinucleotide, or trinucleotide overhangs. In yet another embodiment, siNA molecules of the invention comprise duplex nucleic acid molecules with blunt ends, where both ends are blunt, or alternatively, where one of the ends is blunt.

[0041] In one embodiment, a double stranded nucleic acid (e.g., siNA) molecule comprises nucleotide or non-nucleotide overhangs. By “overhang” is meant a terminal portion of the nucleotide sequence that is not base paired between the two strands of a double stranded nucleic acid molecule (see for example FIG. 6). In one embodiment, a double stranded nucleic acid molecule of the invention can comprise nucleotide or non-nucleotide overhangs at the 3′-end of one or both strands of the double stranded nucleic acid molecule. For example, a double stranded nucleic acid molecule of the invention can comprise a nucleotide or non-nucleotide overhang at the 3′-end of the guide strand or antisense strand/region, the 3′-end of the passenger strand or sense strand/region, or both the guide strand or antisense strand/region and the passenger strand or sense strand/region of the double stranded nucleic acid molecule. In another embodiment, the nucleotide overhang portion of a double stranded nucleic acid (siNA) molecule of the invention comprises 2′-O-methyl, 2′-deoxy, 2′-deoxy-2′-fluoro, 2′-deoxy-2′-fluoroarabino (FANA), 4′-thio, 2′-O-trifluoromethyl, 2′-O-ethyl-trifluoromethoxy, 2′-O-difluoromethoxy-ethoxy, universal base, acyclic, or 5-C-methyl nucleotides. In another embodiment, the non-nucleotide overhang portion of a double stranded nucleic acid (siNA) molecule of the invention comprises glyceryl, abasic, or inverted deoxy abasic non-nucleotides.

[0042] In one embodiment, the nucleotides comprising the overhang portions of a double stranded nucleic acid (e.g., siNA) molecule of the invention correspond to the nucleotides comprising the SREBP1 target polynucleotide sequence of the siNA molecule. Accordingly, in such embodiments, the nucleotides comprising the overhang portion of a siNA molecule of the invention comprise sequence based on the SREBP1 target polynucleotide sequence in which nucleotides comprising the overhang portion of the guide strand or antisense strand/region of a siNA molecule of the invention can be complementary to nucleotides in the SREBP1 target polynucleotide sequence and nucleotides comprising the overhang portion of the passenger strand or sense strand/region of a siNA molecule of the invention can comprise the nucleotides in the SREBP1 target polynucleotide sequence. Such nucleotide overhangs comprise sequence that would result from Dicer processing of a native dsRNA into siRNA.

[0043] In one embodiment, the nucleotides comprising the overhang portion of a double stranded nucleic acid (e.g., siNA) molecule of the invention are complementary to the SREBP1 target polynucleotide sequence and are optionally chemically modified as described herein. As such, in one embodiment, the nucleotides comprising the overhang portion of the guide strand or antisense strand/region of a siNA molecule of the invention can be complementary to nucleotides in the SREBP1 target polynucleotide sequence, i.e. those nucleotide positions in the SREBP1 target polynucleotide sequence that are complementary to the nucleotide positions of the overhang nucleotides in the guide strand or antisense strand/region of a siNA molecule. In another embodiment, the nucleotides comprising the overhang portion of the passenger strand or sense strand/region of a siNA molecule of the invention can comprise the nucleotides in the SREBP1 target polynucleotide sequence, i.e. those nucleotide positions in the SREBP1 target polynucleotide sequence that correspond to same the nucleotide positions of the overhang nucleotides in the passenger strand or sense strand/region of a siNA molecule. In one embodiment, the overhang comprises a two nucleotide (e.g., 3′-GA; 3′-GU; 3′-GG; 3′GC; 3′-CA; 3′-CU; 3′-CG; 3′CC; 3′-UA; 3′-UU; 3′-UG; 3′UC; 3′-AA; 3′-AU; 3′-AG; 3′-AC; 3′-TA; 3′-TU; 3′-TG; 3′-TC; 3′-AT; 3′-UT; 3′-GT; 3′-CT) overhang that is complementary to a portion of the SREBP1 target polynucleotide sequence. In one embodiment, the overhang comprises a two nucleotide (e.g., 3′-GA; 3′-GU; 3′-GG; 3′GC; 3′-CA; 3′-CU; 3′-CG; 3′CC; 3′-UA; 3′-UU; 3′-UG; 3′UC; 3′-AA; 3′-AU; 3′-AG; 3′-AC; 3′-TA; 3′-TU; 3′-TG; 3′-TC; 3′-AT; 3′-UT; 3′-GT; 3′-CT) overhang that is not complementary to a portion of the SREBP1 target polynucleotide sequence. In another embodiment, the overhang nucleotides of a siNA molecule of the invention are 2′-O-methyl nucleotides, 2′-deoxy-2′-fluoroarabino, and/or 2′-deoxy-2′-fluoro nucleotides. In another embodiment, the overhang nucleotides of a siNA molecule of the invention are 2′-O-methyl nucleotides in the event the overhang nucleotides are purine nucleotides and/or 2′-deoxy-2′-fluoro nucleotides or 2′-deoxy-2′-fluoroarabino nucleotides in the event the overhang nucleotides are pyrimidines nucleotides. In another embodiment, the purine nucleotide (when present) in an overhang of siNA molecule of the invention is 2′-O-methyl nucleotides. In another embodiment, the pyrimidine nucleotide (when present) in an overhang of siNA molecule of the invention are 2′-deoxy-2′-fluoro or 2′-deoxy-2′-fluoroarabino nucleotides.

[0044] In one embodiment, the nucleotides comprising the overhang portion of a double stranded nucleic acid (e.g., siNA) molecule of the invention are not complementary to the SREBP1 target polynucleotide sequence and are optionally chemically modified as described herein. In one embodiment, the overhang comprises a 3′-UU overhang that is not complementary to a portion of the SREBP1 target polynucleotide sequence. In another embodiment, the nucleotides comprising the overhanging portion of a siNA molecule of the invention are 2′-O-methyl nucleotides, 2′-deoxy-2′-fluoroarabino and/or 2′-deoxy-2′-fluoro nucleotides.

[0045] In one embodiment, the double stranded nucleic molecule (e.g. siNA) of the invention comprises a two or three nucleotide overhang, wherein the nucleotides in the overhang are the same or different. In one embodiment, the double stranded nucleic molecule (e.g. siNA) of the invention comprises a two or three nucleotide overhang, wherein the nucleotides in the overhang are the same or different and wherein one or more nucleotides in the overhang are chemically modified at the base, sugar and/or phosphate backbone.

[0046] In one embodiment, the invention features one or more chemically-modified siNA constructs having specificity for SREBP1 target nucleic acid molecules, such as DNA, or RNA encoding a protein or non-coding RNA associated with the expression of SREBP1 target genes. In one embodiment, the invention features a RNA based siNA molecule (e.g., a siNA comprising 2′-OH nucleotides) having specificity for nucleic acid molecules that includes one or more chemical modifications described herein. Non-limiting examples of such chemical modifications include without limitation phosphorothioate internucleotide linkages, 2′-deoxyribonucleotides, 2′-O-methyl ribonucleotides, 2′-deoxy-2′-fluoro ribonucleotides, 4′-thio ribonucleotides, 2′-O-trifluoromethyl nucleotides, 2′-O-ethyl-trifluoromethoxy nucleotides, 2′-O-difluoromethoxy-ethoxy nucleotides (see for example U.S. Ser. No. 10/981,966 filed Nov. 5, 2004, incorporated by reference herein), “universal base” nucleotides, “acyclic” nucleotides, 5-C-methyl nucleotides, 2′-deoxy-2′-fluoroarabino (FANA, see for example Dowler et al., 2006, Nucleic Acids Research, 34, 1669-1675) and terminal glyceryl and/or inverted deoxy abasic residue incorporation. These chemical modifications, when used in various siNA constructs, (e.g., RNA based siNA constructs), are shown to preserve RNAi activity in cells while at the same time, dramatically increasing the serum stability of these compounds.

[0047] In one embodiment, a siNA molecule of the invention comprises chemical modifications described herein (e.g., 2′-O-methyl ribonucleotides, 2′-deoxy-2′-fluoro ribonucleotides, 4′-thio ribonucleotides, 2′-O-trifluoromethyl nucleotides, 2′-O-ethyl-trifluoromethoxy nucleotides, 2′-O-difluoromethoxy-ethoxy nucleotides, LNA) at the internal positions of the siNA molecule. By “internal position” is meant the base paired positions of a siNA duplex.

[0048] In one embodiment, a siNA molecule of the invention comprises modified nucleotides while maintaining the ability to mediate RNAi. The modified nucleotides can be used to improve in vitro or in vivo characteristics such as stability, activity, toxicity, immune response, and/or bioavailability. For example, a siNA molecule of the invention can comprise modified nucleotides as a percentage of the total number of nucleotides present in the siNA molecule. As such, a siNA molecule of the invention can generally comprise about 5% to about 100% modified nucleotides (e.g., about 5%, 10%, 15%, 20%, 25%, 30%, 35%, 40%, 45%, 50%, 55%, 60%, 65%, 70%, 75%, 80%, 85%, 90%, 95% or 100% modified nucleotides). For example, in one embodiment, between about 5% to about 100% (e.g., about 5%, 10%, 15%, 20%, 25%, 30%, 35%, 40%, 45%, 50%, 55%, 60%, 65%, 70%, 75%, 80%, 85%, 90%, 95% or 100% modified nucleotides) of the nucleotide positions in a siNA molecule of the invention comprise a nucleic acid sugar modification, such as a 2′-sugar modification, e.g., 2′-O-methyl nucleotides, 2′-deoxy-2′-fluoro nucleotides, 2′-deoxy-2′-fluoroarabino, 2′-O-methoxyethyl nucleotides, 2′-O-trifluoromethyl nucleotides, 2′-O-ethyl-trifluoromethoxy nucleotides, 2′-O-difluoromethoxy-ethoxy nucleotides, or 2′-deoxy nucleotides. In another embodiment, between about 5% to about 100% (e.g., about 5%, 10%, 15%, 20%, 25%, 30%, 35%, 40%, 45%, 50%, 55%, 60%, 65%, 70%, 75%, 80%, 85%, 90%, 95% or 100% modified nucleotides) of the nucleotide positions in a siNA molecule of the invention comprise a nucleic acid base modification, such as inosine, purine, pyridin-4-one, pyridin-2-one, phenyl, pseudouracil, 2,4,6-trimethoxy benzene, 3-methyl uracil, dihydrouridine, naphthyl, aminophenyl, 5-alkylcytidines (e.g., 5-methylcytidine), 5-alkyluridines (e.g., ribothymidine), 5-halouridine (e.g., 5-bromouridine) or 6-azapyrimidines or 6-alkylpyrimidines (e.g. 6-methyluridine), or propyne modifications. In another embodiment, between about 5% to about 100% (e.g., about 5%, 10%, 15%, 20%, 25%, 30%, 35%, 40%, 45%, 50%, 55%, 60%, 65%, 70%, 75%, 80%, 85%, 90%, 95% or 100% modified nucleotides) of the nucleotide positions in a siNA molecule of the invention comprise a nucleic acid backbone modification, such as a backbone modification having Formula I herein. In another embodiment, between about 5% to about 100% (e.g., about 5%, 10%, 15%, 20%, 25%, 30%, 35%, 40%, 45%, 50%, 55%, 60%, 65%, 70%, 75%, 80%, 85%, 90%, 95% or 100% modified nucleotides) of the nucleotide positions in a siNA molecule of the invention comprise a nucleic acid sugar, base, or backbone modification or any combination thereof (e.g., any combination of nucleic acid sugar, base, backbone or non-nucleotide modifications herein). In one embodiment, a siNA molecule of the invention comprises at least about 20%, 25%, 30%, 35%, 40%, 45%, 50%, 55%, 60%, 65%, 70%, 75%, 80%, 85%, 90%, 95% or 100% modified nucleotides. The actual percentage of modified nucleotides present in a given siNA molecule will depend on the total number of nucleotides present in the siNA. If the siNA molecule is single stranded, the percent modification can be based upon the total number of nucleotides present in the single stranded siNA molecules. Likewise, if the siNA molecule is double stranded, the percent modification can be based upon the total number of nucleotides present in the sense strand, antisense strand, or both the sense and antisense strands.

[0049] A siNA molecule of the invention can comprise modified nucleotides at various locations within the siNA molecule. In one embodiment, a double stranded siNA molecule of the invention comprises modified nucleotides at internal base paired positions within the siNA duplex. For example, internal positions can comprise positions from about 3 to about 19 nucleotides from the 5′-end of either sense or antisense strand or region of a 21 nucleotide siNA duplex having 19 base pairs and two nucleotide 3′-overhangs. In another embodiment, a double stranded siNA molecule of the invention comprises modified nucleotides at non-base paired or overhang regions of the siNA molecule. By “non-base paired” is meant, the nucleotides are not base paired between the sense strand or sense region and the antisense strand or antisense region or the siNA molecule. The overhang nucleotides can be complementary or base paired to a corresponding SREBP1 target polynucleotide sequence (see for example FIG. 6C). For example, overhang positions can comprise positions from about 20 to about 21 nucleotides from the 5′-end of either sense or antisense strand or region of a 21 nucleotide siNA duplex having 19 base pairs and two nucleotide 3′-overhangs. In another embodiment, a double stranded siNA molecule of the invention comprises modified nucleotides at terminal positions of the siNA molecule. For example, such terminal regions include the 3′-position, 5′-position, for both 3′ and 5′-positions of the sense and/or antisense strand or region of the siNA molecule. In another embodiment, a double stranded siNA molecule of the invention comprises modified nucleotides at base-paired or internal positions, non-base paired or overhang regions, and/or terminal regions, or any combination thereof.

[0050] One aspect of the invention features a double-stranded short interfering nucleic acid (siNA) molecule that down-regulates expression of a SREBP1 target gene or that directs cleavage of a SREBP1 target RNA. In one embodiment, the double stranded siNA molecule comprises one or more chemical modifications and each strand of the double-stranded siNA is about 21 nucleotides long. In one embodiment, the double-stranded siNA molecule does not contain any ribonucleotides. In another embodiment, the double-stranded siNA molecule comprises one or more ribonucleotides. In one embodiment, each strand of the double-stranded siNA molecule independently comprises about 15 to about 30 (e.g., about 15, 16, 17, 18, 19, 20, 21, 22, 23, 24, 25, 26, 27, 28, 29, or 30) nucleotides, wherein each strand comprises about 15 to about 30 (e.g., about 15, 16, 17, 18, 19, 20, 21, 22, 23, 24, 25, 26, 27, 28, 29, or 30) nucleotides that are complementary to the nucleotides of the other strand. In one embodiment, one of the strands of the double-stranded siNA molecule comprises a nucleotide sequence that is complementary to a nucleotide sequence or a portion thereof of the SREBP1 target gene, and the second strand of the double-stranded siNA molecule comprises a nucleotide sequence substantially similar to the nucleotide sequence of the SREBP1 target gene or a portion thereof.

[0051] In another embodiment, the invention features a double-stranded short interfering nucleic acid (siNA) molecule that down-regulates expression of a SREBP1 target gene or that directs cleavage of a SREBP1 target RNA, comprising an antisense region, wherein the antisense region comprises a nucleotide sequence that is complementary to a nucleotide sequence of the SREBP1 target gene or a portion thereof, and a sense region, wherein the sense region comprises a nucleotide sequence substantially similar to the nucleotide sequence of the SREBP1 target gene or a portion thereof. In one embodiment, the antisense region and the sense region independently comprise about 15 to about 30 (e.g. about 15, 16, 17, 18, 19, 20, 21, 22, 23, 24, 25, 26, 27, 28, 29, or 30) nucleotides, wherein the antisense region comprises about 15 to about 30 (e.g. about 15, 16, 17, 18, 19, 20, 21, 22, 23, 24, 25, 26, 27, 28, 29, or 30) nucleotides that are complementary to nucleotides of the sense region.

[0052] In another embodiment, the invention features a double-stranded short interfering nucleic acid (siNA) molecule that down-regulates expression of a SREBP1 target gene or that directs cleavage of a SREBP1 target RNA, comprising a sense region and an antisense region, wherein the antisense region comprises a nucleotide sequence that is complementary to a nucleotide sequence of RNA encoded by the SREBP1 target gene or a portion thereof and the sense region comprises a nucleotide sequence that is complementary to the antisense region.

[0053] In one embodiment, a siNA molecule of the invention comprises blunt ends, i.e., ends that do not include any overhanging nucleotides. For example, a siNA molecule comprising modifications described herein (e.g., comprising nucleotides having Formulae I-VII or siNA constructs comprising “Stab 00”-“Stab 36” or “Stab 3F”-“Stab 36F” (Table IV) or any combination thereof (see Table IV)) and/or any length described herein can comprise blunt ends or ends with no overhanging nucleotides.

[0054] In one embodiment, any siNA molecule of the invention can comprise one or more blunt ends, i.e. where a blunt end does not have any overhanging nucleotides. In one embodiment, the blunt ended siNA molecule has a number of base pairs equal to the number of nucleotides present in each strand of the siNA molecule. In another embodiment, the siNA molecule comprises one blunt end, for example wherein the 5′-end of the antisense strand and the 3′-end of the sense strand do not have any overhanging nucleotides. In another example, the siNA molecule comprises one blunt end, for example, wherein the 3′-end of the antisense strand and the 5′-end of the sense strand do not have any overhanging nucleotides. In another example, a siNA molecule comprises two blunt ends, for example, wherein the 3′-end of the antisense strand and the 5′-end of the sense strand as well as the 5′-end of the antisense strand and 3′-end of the sense strand do not have any overhanging nucleotides. A blunt ended siNA molecule can comprise, for example, from about 15 to about 30 nucleotides (e.g., about 15, 16, 17, 18, 19, 20, 21, 22, 23, 24, 25, 26, 27, 28, 29, or 30 nucleotides). Other nucleotides present in a blunt ended siNA molecule can comprise, for example, mismatches, bulges, loops, or wobble base pairs to modulate the activity of the siNA molecule to mediate RNA interference.

[0055] By “blunt ends” is meant symmetric termini or termini of a double stranded siNA molecule having no overhanging nucleotides. The two strands of a double stranded siNA molecule align with each other without over-hanging nucleotides at the termini. For example, a blunt ended siNA construct comprises terminal nucleotides that are complementary between the sense and antisense regions of the siNA molecule.

[0056] In one embodiment, the invention features a double-stranded short interfering nucleic acid (siNA) molecule that down-regulates expression of a SREBP1 target gene or that directs cleavage of a SREBP1 target RNA, wherein the siNA molecule is assembled from two separate oligonucleotide fragments wherein one fragment comprises the sense region and the second fragment comprises the antisense region of the siNA molecule. The sense region can be connected to the antisense region via a linker molecule, such as a polynucleotide linker or a non-nucleotide linker.

[0057] In one embodiment, a double stranded nucleic acid molecule (e.g., siNA) molecule of the invention comprises ribonucleotides at positions that maintain or enhance RNAi activity. In one embodiment, ribonucleotides are present in the sense strand or sense region of the siNA molecule, which can provide for RNAi activity by allowing cleavage of the sense strand or sense region by an enzyme within the RISC (e.g., ribonucleotides present at the position of passenger strand, sense strand, or sense region cleavage, such as position 9 of the passenger strand of a 19 base-pair duplex, which is cleaved in the RISC by AGO2 enzyme, see, for example, Matranga et al., 2005, Cell, 123:1-114 and Rand et al., 2005, Cell, 123:621-629). In another embodiment, one or more (for example 1, 2, 3, 4 or 5) nucleotides at the 5′-end of the guide strand or guide region (also known as antisense strand or antisense region) of the siNA molecule are ribonucleotides.

[0058] In one embodiment, a double stranded nucleic acid molecule (e.g., siNA) molecule of the invention comprises one or more ribonucleotides at positions within the passenger strand or passenger region (also known as the sense strand or sense region) that allows cleavage of the passenger strand or passenger region by an enzyme in the RISC complex, (e.g., ribonucleotides present at the position of passenger strand, such as position 9 of the passenger strand of a 19 base-pair duplex that is cleaved in the RISC, see, for example, Matranga et al., 2005, Cell, 123:1-114 and Rand et al., 2005, Cell, 123:621-629).

[0059] In one embodiment, a siNA molecule of the invention contains at least 2, 3, 4, 5, or more chemical modifications that can be the same of different. In one embodiment, a siNA molecule of the invention contains at least 2, 3, 4, 5, or more different chemical modifications.

[0060] In one embodiment, a siNA molecule of the invention is a double-stranded short interfering nucleic acid (siNA), wherein the double stranded nucleic acid molecule comprises about 15 to about 30 (e.g. about 15, 16, 17, 18, 19, 20, 21, 22, 23, 24, 25, 26, 27, 28, 29, or 30) base pairs, and wherein one or more (e.g., at least 1, 2, 3, 4, 5, 6, 7, 8, 9, 10, 11, 12, 13, 14, 15, 16, 17, 18, 19, 20, 21, 22, 23, 24, 25, 26, 27, 28, 29, or 30) of the nucleotide positions in each strand of the siNA molecule comprises a chemical modification. In another embodiment, the siNA contains at least 2, 3, 4, 5, or more different chemical modifications.

[0061] In one embodiment, the invention features double-stranded short interfering nucleic acid (siNA) molecule that down-regulates expression of a SREBP1 target gene or that directs cleavage of a SREBP1 target RNA, wherein the siNA molecule comprises about 15 to about 30 (e.g. about 15, 16, 17, 18, 19, 20, 21, 22, 23, 24, 25, 26, 27, 28, 29, or 30) base pairs, and wherein each strand of the siNA molecule comprises one or more chemical modifications. In one embodiment, each strand of the double stranded siNA molecule comprises at least two (e.g., 2, 3, 4, 5, or more) different chemical modifications, e.g., different nucleotide sugar, base, or backbone modifications. In another embodiment, one of the strands of the double-stranded siNA molecule comprises a nucleotide sequence that is complementary to a nucleotide sequence of a SREBP1 target gene or a portion thereof, and the second strand of the double-stranded siNA molecule comprises a nucleotide sequence substantially similar to the nucleotide sequence or a portion thereof of the SREBP1 target gene. In another embodiment, one of the strands of the double-stranded siNA molecule comprises a nucleotide sequence that is complementary to a nucleotide sequence of a SREBP1 target gene or portion thereof, and the second strand of the double-stranded siNA molecule comprises a nucleotide sequence substantially similar to the nucleotide sequence or portion thereof of the SREBP1 target gene. In another embodiment, each strand of the siNA molecule comprises about 15 to about 30 (e.g. about 15, 16, 17, 18, 19, 20, 21, 22, 23, 24, 25, 26, 27, 28, 29, or 30) nucleotides, and each strand comprises at least about 15 to about 30 (e.g. about 15, 16, 17, 18, 19, 20, 21, 22, 23, 24, 25, 26, 27, 28, 29, or 30) nucleotides that are complementary to the nucleotides of the other strand. The SREBP1 target gene can comprise, for example, sequences referred to herein or incorporated herein by reference. The SREBP1 gene can comprise, for example, sequences referred to in Table I.

[0062] In one embodiment, each strand of a double stranded siNA molecule of the invention comprises a different pattern of chemical modifications, such as any “Stab 00”-“Stab 36” or “Stab 3F”-“Stab 36F” (Table IV) modification patterns herein or any combination thereof (see Table IV). Non-limiting examples of sense and antisense strands of such siNA molecules having various modification patterns are shown in Table III and FIGS. 4 and 5.

[0063] In one embodiment, a siNA molecule of the invention comprises no ribonucleotides. In another embodiment, a siNA molecule of the invention comprises one or more ribonucleotides (e.g., 1, 2, 3, 4, 5, 6, 7, 8, 9, 10, or more ribonucleotides).

[0064] In one embodiment, a siNA molecule of the invention comprises an antisense region comprising a nucleotide sequence that is complementary to a nucleotide sequence of a SREBP1 target gene or a portion thereof, and the siNA further comprises a sense region comprising a nucleotide sequence substantially similar to the nucleotide sequence of the SREBP1 target gene or a portion thereof. In another embodiment, the antisense region and the sense region each comprise about 15 to about 30 (e.g. about 15, 16, 17, 18, 19, 20, 21, 22, 23, 24, 25, 26, 27, 28, 29, or 30) nucleotides and the antisense region comprises at least about 15 to about 30 (e.g. about 15, 16, 17, 18, 19, 20, 21, 22, 23, 24, 25, 26, 27, 28, 29, or 30) nucleotides that are complementary to nucleotides of the sense region. In one embodiment, each strand of the double stranded siNA molecule comprises at least two (e.g., 2, 3, 4, 5, or more) different chemical modifications, e.g., different nucleotide sugar, base, or backbone modifications. The SREBP1 target gene can comprise, for example, sequences referred to herein or incorporated by reference herein. In another embodiment, the siNA is a double stranded nucleic acid molecule, where each of the two strands of the siNA molecule independently comprise about 15 to about 40 (e.g. about 15, 16, 17, 18, 19, 20, 21, 22, 23, 24, 25, 26, 27, 28, 29, 30, 31, 23, 33, 34, 35, 36, 37, 38, 39, or 40) nucleotides, and where one of the strands of the siNA molecule comprises at least about 15 (e.g. about 15, 16, 17, 18, 19, 20, 21, 22, 23, 24 or 25 or more) nucleotides that are complementary to the nucleic acid sequence of the SREBP1 target gene or a portion thereof.

[0065] In one embodiment, a siNA molecule of the invention comprises a sense region and an antisense region, wherein the antisense region comprises a nucleotide sequence that is complementary to a nucleotide sequence of RNA encoded by a SREBP1 target gene, or a portion thereof, and the sense region comprises a nucleotide sequence that is complementary to the antisense region. In one embodiment, the siNA molecule is assembled from two separate oligonucleotide fragments, wherein one fragment comprises the sense region and the second fragment comprises the antisense region of the siNA molecule. In another embodiment, the sense region is connected to the antisense region via a linker molecule. In another embodiment, the sense region is connected to the antisense region via a linker molecule, such as a nucleotide or non-nucleotide linker. In one embodiment, each strand of the double stranded siNA molecule comprises at least two (e.g., 2, 3, 4, 5, or more) different chemical modifications, e.g., different nucleotide sugar, base, or backbone modifications. The SREBP1 target gene can comprise, for example, sequences referred herein or incorporated by reference herein.

[0066] In one embodiment, a siNA molecule of the invention comprises one or more (e.g., 1, 2, 3, 4, 5, 6, 7, 8, 9, 10, 11, 12, 13, 14, 15, 16, 17, 18, 19, 20 or more) 2′-deoxy-2′-fluoro pyrimidine modifications (e.g., where one or more or all pyrimidine (e.g., U or C) positions of the siNA are modified with 2′-deoxy-2′-fluoro nucleotides). In one embodiment, the 2′-deoxy-2′-fluoro pyrimidine modifications are present in the sense strand. In one embodiment, the 2′-deoxy-2′-fluoro pyrimidine modifications are present in the antisense strand. In one embodiment, the 2′-deoxy-2′-fluoro pyrimidine modifications are present in both the sense strand and the antisense strand of the siNA molecule.

[0067] In one embodiment, a siNA molecule of the invention comprises one or more (e.g., 1, 2, 3, 4, 5, 6, 7, 8, 9, 10, 11, 12, 13, 14, 15, 16, 17, 18, 19, 20 or more) 2′-O-methyl purine modifications (e.g., where one or more or all purine (e.g., A or G) positions of the siNA are modified with 2′-O-methyl nucleotides). In one embodiment, the 2′-O-methyl purine modifications are present in the sense strand. In one embodiment, the 2′-O-methyl purine modifications are present in the antisense strand. In one embodiment, the 2′-O-methyl purine modifications are present in both the sense strand and the antisense strand of the siNA molecule.

[0068] In one embodiment, a siNA molecule of the invention comprises one or more (e.g., 1, 2, 3, 4, 5, 6, 7, 8, 9, 10, 11, 12, 13, 14, 15, 16, 17, 18, 19, 20 or more) 2′-deoxy purine modifications (e.g., where one or more or all purine (e.g., A or G) positions of the siNA are modified with 2′-deoxy nucleotides). In one embodiment, the 2′-deoxy purine modifications are present in the sense strand. In one embodiment, the 2′-deoxy purine modifications are present in the antisense strand. In one embodiment, the 2′-deoxy purine modifications are present in both the sense strand and the antisense strand of the siNA molecule.

[0069] In one embodiment, the invention features a double-stranded short interfering nucleic acid (siNA) molecule that down-regulates expression of a SREBP1 target gene or that directs cleavage of a SREBP1 target RNA, comprising a sense region and an antisense region, wherein the antisense region comprises a nucleotide sequence that is complementary to a nucleotide sequence of RNA encoded by the SREBP1 target gene or a portion thereof and the sense region comprises a nucleotide sequence that is complementary to the antisense region, and wherein the siNA molecule has one or more modified pyrimidine and/or purine nucleotides. In one embodiment, each strand of the double stranded siNA molecule comprises at least two (e.g., 2, 3, 4, 5, or more) different chemical modifications, e.g., different nucleotide sugar, base, or backbone modifications. In one embodiment, the pyrimidine nucleotides in the sense region are 2′-O-methylpyrimidine nucleotides or 2′-deoxy-2′-fluoro pyrimidine nucleotides and the purine nucleotides present in the sense region are 2′-deoxy purine nucleotides. In another embodiment, the pyrimidine nucleotides in the sense region are 2′-deoxy-2′-fluoro pyrimidine nucleotides and the purine nucleotides present in the sense region are 2′-O-methyl purine nucleotides. In another embodiment, the pyrimidine nucleotides in the sense region are 2′-deoxy-2′-fluoro pyrimidine nucleotides and the purine nucleotides present in the sense region are 2′-deoxy purine nucleotides. In one embodiment, the pyrimidine nucleotides in the antisense region are 2′-deoxy-2′-fluoro pyrimidine nucleotides and the purine nucleotides present in the antisense region are 2′-O-methyl or 2′-deoxy purine nucleotides. In another embodiment of any of the above-described siNA molecules, any nucleotides present in a non-complementary region of the sense strand (e.g. overhang region) are 2′-deoxy nucleotides.

[0070] In one embodiment, the invention features a double-stranded short interfering nucleic acid (siNA) molecule that down-regulates expression of a SREBP1 target gene or that directs cleavage of a SREBP1 target RNA, wherein the siNA molecule is assembled from two separate oligonucleotide fragments wherein one fragment comprises the sense region and the second fragment comprises the antisense region of the siNA molecule, and wherein the fragment comprising the sense region includes a terminal cap moiety at the 5′-end, the 3′-end, or both of the 5′ and 3′ ends of the fragment. In one embodiment, the terminal cap moiety is an inverted deoxy abasic moiety or glyceryl moiety. In one embodiment, each of the two fragments of the siNA molecule independently comprise about 15 to about 30 (e.g. about 15, 16, 17, 18, 19, 20, 21, 22, 23, 24, 25, 26, 27, 28, 29, or 30) nucleotides. In another embodiment, each of the two fragments of the siNA molecule independently comprise about 15 to about 40 (e.g. about 15, 16, 17, 18, 19, 20, 21, 22, 23, 24, 25, 26, 27, 28, 29, 30, 31, 23, 33, 34, 35, 36, 37, 38, 39, or 40) nucleotides. In a non-limiting example, each of the two fragments of the siNA molecule comprise about 21 nucleotides.

[0071] In one embodiment, the invention features a siNA molecule comprising at least one modified nucleotide, wherein the modified nucleotide is a 2′-deoxy-2′-fluoro nucleotide, 2′-deoxy-2′-fluoroarabino, 2′-O-trifluoromethyl nucleotide, 2′-O-ethyl-trifluoromethoxy nucleotide, or 2′-O-difluoromethoxy-ethoxy nucleotide or any other modified nucleoside/nucleotide described herein and in U.S. Ser. No. 10/981,966, filed Nov. 5, 2004, incorporated by reference herein. In one embodiment, the invention features a siNA molecule comprising at least two (e.g., 2, 3, 4, 5, 6, 7, 8, 9, 10, or more) modified nucleotides, wherein the modified nucleotide is selected from the group consisting of 2′-deoxy-2′-fluoro nucleotide, 2′-deoxy-2′-fluoroarabino, 2′-O-trifluoromethyl nucleotide, 2′-O-ethyl-trifluoromethoxy nucleotide, or 2′-O-difluoromethoxy-ethoxy nucleotide or any other modified nucleoside/nucleotide described herein and in U.S. Ser. No. 10/981,966, filed Nov. 5, 2004, incorporated by reference herein. The modified nucleotide/nucleoside can be the same or different. The siNA can be, for example, about 15 to about 40 nucleotides in length. In one embodiment, all pyrimidine nucleotides present in the siNA are 2′-deoxy-2′-fluoro, 2′-deoxy-2′-fluoroarabino, 2′-O-trifluoromethyl, 2′-O-ethyl-trifluoromethoxy, or 2′-O-difluoromethoxy-ethoxy, 4′-thio pyrimidine nucleotides. In one embodiment, the modified nucleotides in the siNA include at least one 2′-deoxy-2′-fluoro cytidine or 2′-deoxy-2′-fluoro uridine nucleotide. In another embodiment, the modified nucleotides in the siNA include at least one 2′-deoxy-2′-fluoro cytidine and at least one 2′-deoxy-2′-fluoro uridine nucleotides. In one embodiment, all uridine nucleotides present in the siNA are 2′-deoxy-2′-fluoro uridine nucleotides. In one embodiment, all cytidine nucleotides present in the siNA are 2′-deoxy-2′-fluoro cytidine nucleotides. In one embodiment, all adenosine nucleotides present in the siNA are 2′-deoxy-2′-fluoro adenosine nucleotides. In one embodiment, all guanosine nucleotides present in the siNA are 2′-deoxy-2′-fluoro guanosine nucleotides. The siNA can further comprise at least one modified internucleotidic linkage, such as phosphorothioate linkage. In one embodiment, the 2′-deoxy-2′-fluoronucleotides are present at specifically selected locations in the siNA that are sensitive to cleavage by ribonucleases, such as locations having pyrimidine nucleotides.

[0072] In one embodiment, the invention features a method of increasing the stability of a siNA molecule against cleavage by ribonucleases comprising introducing at least one modified nucleotide into the siNA molecule, wherein the modified nucleotide is a 2′-deoxy-2′-fluoro nucleotide. In one embodiment, all pyrimidine nucleotides present in the siNA are 2′-deoxy-2′-fluoro pyrimidine nucleotides. In one embodiment, the modified nucleotides in the siNA include at least one 2′-deoxy-2′-fluoro cytidine or 2′-deoxy-2′-fluoro uridine nucleotide. In another embodiment, the modified nucleotides in the siNA include at least one 2′-fluoro cytidine and at least one 2′-deoxy-2′-fluoro uridine nucleotides. In one embodiment, all uridine nucleotides present in the siNA are 2′-deoxy-2′-fluoro uridine nucleotides. In one embodiment, all cytidine nucleotides present in the siNA are 2′-deoxy-2′-fluoro cytidine nucleotides. In one embodiment, all adenosine nucleotides present in the siNA are 2′-deoxy-2′-fluoro adenosine nucleotides. In one embodiment, all guanosine nucleotides present in the siNA are 2′-deoxy-2′-fluoro guanosine nucleotides. The siNA can further comprise at least one modified internucleotidic linkage, such as a phosphorothioate linkage. In one embodiment, the 2′-deoxy-2′-fluoronucleotides are present at specifically selected locations in the siNA that are sensitive to cleavage by ribonucleases, such as locations having pyrimidine nucleotides.

[0073] In one embodiment, the invention features a method of increasing the stability of a siNA molecule against cleavage by ribonucleases comprising introducing at least one modified nucleotide into the siNA molecule, wherein the modified nucleotide is a 2′-deoxy-2′-fluoroarabino nucleotide. In one embodiment, all pyrimidine nucleotides present in the siNA are 2′-deoxy-2′-fluoroarabino pyrimidine nucleotides. In one embodiment, the modified nucleotides in the siNA include at least one 2′-deoxy-2′-fluoroarabino cytidine or 2′-deoxy-2′-fluoroarabino uridine nucleotide. In another embodiment, the modified nucleotides in the siNA include at least one 2′-fluoro cytidine and at least one 2′-deoxy-2′-fluoroarabino uridine nucleotides. In one embodiment, all uridine nucleotides present in the siNA are 2′-deoxy-2′-fluoroarabino uridine nucleotides. In one embodiment, all cytidine nucleotides present in the siNA are 2′-deoxy-2′-fluoroarabino cytidine nucleotides. In one embodiment, all adenosine nucleotides present in the siNA are 2′-deoxy-2′-fluoroarabino adenosine nucleotides. In one embodiment, all guanosine nucleotides present in the siNA are 2′-deoxy-2′-fluoroarabino guanosine nucleotides. The siNA can further comprise at least one modified internucleotidic linkage, such as a phosphorothioate linkage. In one embodiment, the 2′-deoxy-2′-fluoroarabinonucleotides are present at specifically selected locations in the siNA that are sensitive to cleavage by ribonucleases, such as locations having pyrimidine nucleotides.

[0074] In one embodiment, the invention features a double-stranded short interfering nucleic acid (siNA) molecule that down-regulates expression of a SREBP1 target gene or that directs cleavage of a SREBP1 target RNA, comprising a sense region and an antisense region, wherein the antisense region comprises a nucleotide sequence that is complementary to a nucleotide sequence of RNA encoded by the SREBP1 target gene or a portion thereof and the sense region comprises a nucleotide sequence that is complementary to the antisense region, and wherein the purine nucleotides present in the antisense region comprise 2′-deoxy-purine nucleotides. In an alternative embodiment, the purine nucleotides present in the antisense region comprise 2′-O-methyl purine nucleotides. In either of the above embodiments, the antisense region can comprise a phosphorothioate internucleotide linkage at the 3′ end of the antisense region. Alternatively, in either of the above embodiments, the antisense region can comprise a glyceryl modification at the 3′ end of the antisense region. In another embodiment of any of the above-described siNA molecules, any nucleotides present in a non-complementary region of the antisense strand (e.g. overhang region) are 2′-deoxy nucleotides.

[0075] In one embodiment, the antisense region of a siNA molecule of the invention comprises sequence complementary to a portion of an endogenous transcript having sequence unique to a particular disease or trait related allele in a subject or organism, such as sequence comprising a single nucleotide polymorphism (SNP) associated with the disease or trait specific allele. As such, the antisense region of a siNA molecule of the invention can comprise sequence complementary to sequences that are unique to a particular allele to provide specificity in mediating selective RNAi against the disease, condition, or trait related allele.

[0076] In one embodiment, the invention features a double-stranded short interfering nucleic acid (siNA) molecule that down-regulates expression of a SREBP1 target gene or that directs cleavage of a SREBP1 target RNA, wherein the siNA molecule is assembled from two separate oligonucleotide fragments wherein one fragment comprises the sense region and the second fragment comprises the antisense region of the siNA molecule. In one embodiment, each strand of the double stranded siNA molecule is about 21 nucleotides long where about 19 nucleotides of each fragment of the siNA molecule are base-paired to the complementary nucleotides of the other fragment of the siNA molecule, wherein at least two 3′ terminal nucleotides of each fragment of the siNA molecule are not base-paired to the nucleotides of the other fragment of the siNA molecule. In another embodiment, the siNA molecule is a double stranded nucleic acid molecule, where each strand is about 19 nucleotide long and where the nucleotides of each fragment of the siNA molecule are base-paired to the complementary nucleotides of the other fragment of the siNA molecule to form at least about 15 (e.g., 15, 16, 17, 18, or 19) base pairs, wherein one or both ends of the siNA molecule are blunt ends. In one embodiment, each of the two 3′ terminal nucleotides of each fragment of the siNA molecule is a 2′-deoxy-pyrimidine nucleotide, such as a 2′-deoxy-thymidine. In one embodiment, each of the two 3′ terminal nucleotides of each fragment of the siNA molecule is a 2′-O-methylpyrimidine nucleotide, such as a 2′-O-methyl uridine, cytidine, or thymidine. In another embodiment, all nucleotides of each fragment of the siNA molecule are base-paired to the complementary nucleotides of the other fragment of the siNA molecule. In another embodiment, the siNA molecule is a double stranded nucleic acid molecule of about 19 to about 25 base pairs having a sense region and an antisense region, where about 19 nucleotides of the antisense region are base-paired to the nucleotide sequence or a portion thereof of the RNA encoded by the SREBP1 target gene. In another embodiment, about 21 nucleotides of the antisense region are base-paired to the nucleotide sequence or a portion thereof of the RNA encoded by the SREBP1 target gene. In any of the above embodiments, the 5′-end of the fragment comprising said antisense region can optionally include a phosphate group.

[0077] In one embodiment, the invention features a double-stranded short interfering nucleic acid (siNA) molecule that inhibits the expression of a SREBP1 target RNA sequence, wherein the siNA molecule does not contain any ribonucleotides and wherein each strand of the double-stranded siNA molecule is about 15 to about 30 nucleotides. In one embodiment, the siNA molecule is 21 nucleotides in length. Examples of non-ribonucleotide containing siNA constructs are combinations of stabilization chemistries shown in Table IV in any combination of Sense/Antisense chemistries, such as Stab 7/8, Stab 7/11, Stab 8/8, Stab 18/8, Stab 18/11, Stab 12/13, Stab 7/13, Stab 18/13, Stab 7/19, Stab 8/19, Stab 18/19, Stab 7/20, Stab 8/20, Stab 18/20, Stab 7/32, Stab 8/32, or Stab 18/32 (e.g., any siNA having Stab 7, 8, 11, 12, 13, 14, 15, 17, 18, 19, 20, or 32 sense or antisense strands or any combination thereof). Herein, numeric Stab chemistries can include both 2′-fluoro and 2′-OCF3 versions of the chemistries shown in Table IV. For example, “Stab 7/8” refers to both Stab 7/8 and Stab 7F/8F etc. In one embodiment, the invention features a chemically synthesized double stranded RNA molecule that directs cleavage of a SREBP1 target RNA via RNA interference, wherein each strand of said RNA molecule is about 15 to about 30 nucleotides in length; one strand of the RNA molecule comprises nucleotide sequence having sufficient complementarity to the SREBP1 target RNA for the RNA molecule to direct cleavage of the SREBP1 target RNA via RNA interference; and wherein at least one strand of the RNA molecule optionally comprises one or more chemically modified nucleotides described herein, such as without limitation deoxynucleotides, 2′-O-methyl nucleotides, 2′-deoxy-2′-fluoro nucleotides, 2′-deoxy-2′-fluoroarabino, 2′-O-methoxyethyl nucleotides, 4′-thio nucleotides, 2′-O-trifluoromethyl nucleotides, 2′-O-ethyl-trifluoromethoxy nucleotides, 2′-O-difluoromethoxy-ethoxy nucleotides, etc. or any combination thereof.

[0078] In one embodiment, a SREBP1 target RNA of the invention comprises sequence encoding a protein.

[0079] In one embodiment, SREBP1 target RNA of the invention comprises non-coding RNA sequence (e.g., miRNA, snRNA, siRNA etc.), see for example Mattick, 2005, Science, 309, 1527-1528; Clayerie, 2005, Science, 309, 1529-1530; Sethupathy et al., 2006, RNA, 12, 192-197; and Czech, 2006 NEJM, 354, 11: 1194-1195.

[0080] In one embodiment, the invention features a medicament comprising a siNA molecule of the invention.

[0081] In one embodiment, the invention features an active ingredient comprising a siNA molecule of the invention.

[0082] In one embodiment, the invention features the use of a double-stranded short interfering nucleic acid (siNA) molecule to inhibit, down-regulate, or reduce expression of a SREBP1 target gene, wherein the siNA molecule comprises one or more chemical modifications and each strand of the double-stranded siNA is independently about 15 to about 30 or more (e.g., about 15, 16, 17, 18, 19, 20, 21, 22, 23, 24, 25, 26, 27, 28, 29 or 30 or more) nucleotides long. In one embodiment, the siNA molecule of the invention is a double stranded nucleic acid molecule comprising one or more chemical modifications, where each of the two fragments of the siNA molecule independently comprise about 15 to about 40 (e.g. about 15, 16, 17, 18, 19, 20, 21, 22, 23, 24, 25, 26, 27, 28, 29, 30, 31, 23, 33, 34, 35, 36, 37, 38, 39, or 40) nucleotides and where one of the strands comprises at least 15 nucleotides that are complementary to nucleotide sequence of SREBP1 target encoding RNA or a portion thereof. In a non-limiting example, each of the two fragments of the siNA molecule comprise about 21 nucleotides. In another embodiment, the siNA molecule is a double stranded nucleic acid molecule comprising one or more chemical modifications, where each strand is about 21 nucleotide long and where about 19 nucleotides of each fragment of the siNA molecule are base-paired to the complementary nucleotides of the other fragment of the siNA molecule, wherein at least two 3′ terminal nucleotides of each fragment of the siNA molecule are not base-paired to the nucleotides of the other fragment of the siNA molecule. In another embodiment, the siNA molecule is a double stranded nucleic acid molecule comprising one or more chemical modifications, where each strand is about 19 nucleotide long and where the nucleotides of each fragment of the siNA molecule are base-paired to the complementary nucleotides of the other fragment of the siNA molecule to form at least about 15 (e.g., 15, 16, 17, 18, or 19) base pairs, wherein one or both ends of the siNA molecule are blunt ends. In one embodiment, each of the two 3′ terminal nucleotides of each fragment of the siNA molecule is a 2′-deoxy-pyrimidine nucleotide, such as a 2′-deoxy-thymidine. In one embodiment, each of the two 3′ terminal nucleotides of each fragment of the siNA molecule is a 2′-O-methylpyrimidine nucleotide, such as a 2′-O-methyl uridine, cytidine, or thymidine. In another embodiment, all nucleotides of each fragment of the siNA molecule are base-paired to the complementary nucleotides of the other fragment of the siNA molecule. In another embodiment, the siNA molecule is a double stranded nucleic acid molecule of about 19 to about 25 base pairs having a sense region and an antisense region and comprising one or more chemical modifications, where about 19 nucleotides of the antisense region are base-paired to the nucleotide sequence or a portion thereof of the RNA encoded by the SREBP1 target gene. In another embodiment, about 21 nucleotides of the antisense region are base-paired to the nucleotide sequence or a portion thereof of the RNA encoded by the SREBP1 target gene. In any of the above embodiments, the 5′-end of the fragment comprising said antisense region can optionally include a phosphate group.

[0083] In one embodiment, the invention features the use of a double-stranded short interfering nucleic acid (siNA) molecule that inhibits, down-regulates, or reduces expression of a SREBP1 target gene, wherein one of the strands of the double-stranded siNA molecule is an antisense strand which comprises nucleotide sequence that is complementary to nucleotide sequence of SREBP1 target RNA or a portion thereof, the other strand is a sense strand which comprises nucleotide sequence that is complementary to a nucleotide sequence of the antisense strand. In one embodiment, each strand has at least two (e.g., 2, 3, 4, 5, or more) chemical modifications, which can be the same or different, such as nucleotide, sugar, base, or backbone modifications. In one embodiment, a majority of the pyrimidine nucleotides present in the double-stranded siNA molecule comprises a sugar modification. In one embodiment, a majority of the purine nucleotides present in the double-stranded siNA molecule comprises a sugar modification.

[0084] In one embodiment, the invention features a double-stranded short interfering nucleic acid (siNA) molecule that inhibits, down-regulates, or reduces expression of a SREBP1 target gene, wherein one of the strands of the double-stranded siNA molecule is an antisense strand which comprises nucleotide sequence that is complementary to nucleotide sequence of SREBP1 target RNA or a portion thereof, wherein the other strand is a sense strand which comprises nucleotide sequence that is complementary to a nucleotide sequence of the antisense strand. In one embodiment, each strand has at least two (e.g., 2, 3, 4, 5, or more) chemical modifications, which can be the same or different, such as nucleotide, sugar, base, or backbone modifications. In one embodiment, a majority of the pyrimidine nucleotides present in the double-stranded siNA molecule comprises a sugar modification. In one embodiment, a majority of the purine nucleotides present in the double-stranded siNA molecule comprises a sugar modification.

[0085] In one embodiment, the invention features a double-stranded short interfering nucleic acid (siNA) molecule that inhibits, down-regulates, or reduces expression of a SREBP1 target gene, wherein one of the strands of the double-stranded siNA molecule is an antisense strand which comprises nucleotide sequence that is complementary to nucleotide sequence of SREBP1 target RNA that encodes a protein or portion thereof, the other strand is a sense strand which comprises nucleotide sequence that is complementary to a nucleotide sequence of the antisense strand and wherein a majority of the pyrimidine nucleotides present in the double-stranded siNA molecule comprises a sugar modification. In one embodiment, each strand of the siNA molecule comprises about 15 to about 30 or more (e.g., about 15, 16, 17, 18, 19, 20, 21, 22, 23, 24, 25, 26, 27, 28, 29, or 30 or more) nucleotides, wherein each strand comprises at least about 15 nucleotides that are complementary to the nucleotides of the other strand. In one embodiment, the siNA molecule is assembled from two oligonucleotide fragments, wherein one fragment comprises the nucleotide sequence of the antisense strand of the siNA molecule and a second fragment comprises nucleotide sequence of the sense region of the siNA molecule. In one embodiment, the sense strand is connected to the antisense strand via a linker molecule, such as a polynucleotide linker or a non-nucleotide linker. In a further embodiment, the pyrimidine nucleotides present in the sense strand are 2′-deoxy-2′fluoro pyrimidine nucleotides and the purine nucleotides present in the sense region are 2′-deoxy purine nucleotides. In another embodiment, the pyrimidine nucleotides present in the sense strand are 2′-deoxy-2′fluoro pyrimidine nucleotides and the purine nucleotides present in the sense region are 2′-O-methyl purine nucleotides. In still another embodiment, the pyrimidine nucleotides present in the antisense strand are 2′-deoxy-2′-fluoro pyrimidine nucleotides and any purine nucleotides present in the antisense strand are 2′-deoxy purine nucleotides. In another embodiment, the antisense strand comprises one or more 2′-deoxy-2′-fluoro pyrimidine nucleotides and one or more 2′-O-methyl purine nucleotides. In another embodiment, the pyrimidine nucleotides present in the antisense strand are 2′-deoxy-2′-fluoro pyrimidine nucleotides and any purine nucleotides present in the antisense strand are 2′-O-methyl purine nucleotides. In a further embodiment the sense strand comprises a 3′-end and a 5′-end, wherein a terminal cap moiety (e.g., an inverted deoxy abasic moiety or inverted deoxy nucleotide moiety such as inverted thymidine) is present at the 5′-end, the 3′-end, or both of the 5′ and 3′ ends of the sense strand. In another embodiment, the antisense strand comprises a phosphorothioate internucleotide linkage at the 3′ end of the antisense strand. In another embodiment, the antisense strand comprises a glyceryl modification at the 3′ end. In another embodiment, the 5′-end of the antisense strand optionally includes a phosphate group.

[0086] In any of the above-described embodiments of a double-stranded short interfering nucleic acid (siNA) molecule that inhibits expression of a SREBP1 target gene, wherein a majority of the pyrimidine nucleotides present in the double-stranded siNA molecule comprises a sugar modification, each of the two strands of the siNA molecule can comprise about 15 to about 30 or more (e.g., about 15, 16, 17, 18, 19, 20, 21, 22, 23, 24, 25, 26, 27, 28, 29, or 30 or more) nucleotides. In one embodiment, about 15 to about 30 or more (e.g., about 15, 16, 17, 18, 19, 20, 21, 22, 23, 24, 25, 26, 27, 28, 29, or 30 or more) nucleotides of each strand of the siNA molecule are base-paired to the complementary nucleotides of the other strand of the siNA molecule. In another embodiment, about 15 to about 30 or more (e.g., about 15, 16, 17, 18, 19, 20, 21, 22, 23, 24, 25, 26, 27, 28, 29, or 30 or more) nucleotides of each strand of the siNA molecule are base-paired to the complementary nucleotides of the other strand of the siNA molecule, wherein at least two 3′ terminal nucleotides of each strand of the siNA molecule are not base-paired to the nucleotides of the other strand of the siNA molecule. In another embodiment, each of the two 3′ terminal nucleotides of each fragment of the siNA molecule is a 2′-deoxy-pyrimidine, such as 2′-deoxy-thymidine. In one embodiment, each strand of the siNA molecule is base-paired to the complementary nucleotides of the other strand of the siNA molecule. In one embodiment, about 15 to about 30 (e.g., about 15, 16, 17, 18, 19, 20, 21, 22, 23, 24, 25, 26, 27, 28, 29, or 30) nucleotides of the antisense strand are base-paired to the nucleotide sequence of the SREBP1 target RNA or a portion thereof. In one embodiment, about 18 to about 25 (e.g., about 18, 19, 20, 21, 22, 23, 24, or 25) nucleotides of the antisense strand are base-paired to the nucleotide sequence of the SREBP1 target RNA or a portion thereof.

[0087] In one embodiment, the invention features a double-stranded short interfering nucleic acid (siNA) molecule that inhibits expression of a SREBP1 target gene, wherein one of the strands of the double-stranded siNA molecule is an antisense strand which comprises nucleotide sequence that is complementary to nucleotide sequence of SREBP1 target RNA or a portion thereof, the other strand is a sense strand which comprises nucleotide sequence that is complementary to a nucleotide sequence of the antisense strand. In one embodiment, each strand has at least two (e.g., 2, 3, 4, 5, or more) different chemical modifications, such as nucleotide sugar, base, or backbone modifications. In one embodiment, a majority of the pyrimidine nucleotides present in the double-stranded siNA molecule comprises a sugar modification. In one embodiment, a majority of the purine nucleotides present in the double-stranded siNA molecule comprises a sugar modification. In one embodiment, the 5′-end of the antisense strand optionally includes a phosphate group.

[0088] In one embodiment, the invention features a double-stranded short interfering nucleic acid (siNA) molecule that inhibits expression of a SREBP1 target gene, wherein one of the strands of the double-stranded siNA molecule is an antisense strand which comprises nucleotide sequence that is complementary to nucleotide sequence of SREBP1 target RNA or a portion thereof, the other strand is a sense strand which comprises nucleotide sequence that is complementary to a nucleotide sequence of the antisense strand and wherein a majority of the pyrimidine nucleotides present in the double-stranded siNA molecule comprises a sugar modification, and wherein the nucleotide sequence or a portion thereof of the antisense strand is complementary to a nucleotide sequence of the untranslated region or a portion thereof of the SREBP1 target RNA.

[0089] In one embodiment, the invention features a double-stranded short interfering nucleic acid (siNA) molecule that inhibits expression of a SREBP1 target gene, wherein one of the strands of the double-stranded siNA molecule is an antisense strand which comprises nucleotide sequence that is complementary to nucleotide sequence of SREBP1 target RNA or a portion thereof, wherein the other strand is a sense strand which comprises nucleotide sequence that is complementary to a nucleotide sequence of the antisense strand, wherein a majority of the pyrimidine nucleotides present in the double-stranded siNA molecule comprises a sugar modification, and wherein the nucleotide sequence of the antisense strand is complementary to a nucleotide sequence of the SREBP1 target RNA or a portion thereof that is present in the SREBP1 target RNA.

[0090] In one embodiment, the invention features a composition comprising a siNA molecule of the invention and a pharmaceutically acceptable carrier or diluent. In another embodiment, the invention features two or more differing siNA molecules of the invention (e.g. siNA molecules that target different regions of SREBP1 target RNA or siNA molecules that target SREBP1 pathway RNA) and a pharmaceutically acceptable carrier or diluent.

[0091] In a non-limiting example, the introduction of chemically-modified nucleotides into nucleic acid molecules provides a powerful tool in overcoming potential limitations of in vivo stability and bioavailability inherent to native RNA molecules that are delivered exogenously. For example, the use of chemically-modified nucleic acid molecules can enable a lower dose of a particular nucleic acid molecule for a given therapeutic effect since chemically-modified nucleic acid molecules tend to have a longer half-life in serum. Furthermore, certain chemical modifications can improve the bioavailability of nucleic acid molecules by SREBP1 targeting particular cells or tissues and/or improving cellular uptake of the nucleic acid molecule. Therefore, even if the activity of a chemically-modified nucleic acid molecule is reduced as compared to a native nucleic acid molecule, for example, when compared to an all-RNA nucleic acid molecule, the overall activity of the modified nucleic acid molecule can be greater than that of the native molecule due to improved stability and/or delivery of the molecule. Unlike native unmodified siNA, chemically-modified siNA can also minimize the possibility of activating interferon activity or immunostimulation in humans. These properties therefore improve upon native siRNA or minimally modified siRNA's ability to mediate RNAi in various in vitro and in vivo settings, including use in both research and therapeutic applications. Applicant describes herein chemically modified siNA molecules with improved RNAi activity compared to corresponding unmodified or minimally modified siRNA molecules. The chemically modified siNA motifs disclosed herein provide the capacity to maintain RNAi activity that is substantially similar to unmodified or minimally modified active siRNA (see for example Elbashir et al., 2001, EMBO J., 20:6877-6888) while at the same time providing nuclease resistance and pharmacoketic properties suitable for use in therapeutic applications.

[0092] In any of the embodiments of siNA molecules described herein, the antisense region of a siNA molecule of the invention can comprise a phosphorothioate internucleotide linkage at the 3′-end of said antisense region. In any of the embodiments of siNA molecules described herein, the antisense region can comprise about one to about five phosphorothioate internucleotide linkages at the 5′-end of said antisense region. In any of the embodiments of siNA molecules described herein, the 3′-terminal nucleotide overhangs of a siNA molecule of the invention can comprise ribonucleotides or deoxyribonucleotides that are chemically-modified at a nucleic acid sugar, base, or backbone. In any of the embodiments of siNA molecules described herein, the 3′-terminal nucleotide overhangs can comprise one or more universal base ribonucleotides. In any of the embodiments of siNA molecules described herein, the 3′-terminal nucleotide overhangs can comprise one or more acyclic nucleotides.

[0093] One embodiment of the invention provides an expression vector comprising a nucleic acid sequence encoding at least one siNA molecule of the invention in a manner that allows expression of the nucleic acid molecule. Another embodiment of the invention provides a mammalian cell comprising such an expression vector. The mammalian cell can be a human cell. The siNA molecule of the expression vector can comprise a sense region and an antisense region. The antisense region can comprise sequence complementary to a RNA or DNA sequence encoding a SREBP1 target and the sense region can comprise sequence complementary to the antisense region. The siNA molecule can comprise two distinct strands having complementary sense and antisense regions. The siNA molecule can comprise a single strand having complementary sense and antisense regions.

[0094] In one embodiment, the invention features a chemically-modified short interfering nucleic acid (siNA) molecule capable of mediating RNA interference (RNAi) inside a cell or reconstituted in vitro system, wherein the chemical modification comprises one or more (e.g., about 1, 2, 3, 4, 5, 6, 7, 8, 9, 10, or more) nucleotides comprising a backbone modified internucleotide linkage having Formula I:

[chemical structure]

[0095] wherein each R1 and R2 is independently any nucleotide, non-nucleotide, or polynucleotide which can be naturally-occurring or chemically-modified and which can be included in the structure of the siNA molecule or serve as a point of attachment to the siNA molecule, each X and Y is independently O, S, N, alkyl, or substituted alkyl, each Z and W is independently O, S, N, alkyl, substituted alkyl, O-alkyl, S-alkyl, alkaryl, aralkyl, or acetyl and wherein W, X, Y, and Z are optionally not all O. In another embodiment, a backbone modification of the invention comprises a phosphonoacetate and/or thiophosphonoacetate internucleotide linkage (see for example Sheehan et al., 2003, Nucleic Acids Research, 31, 4109-4118).

[0096] The chemically-modified internucleotide linkages having Formula I, for example, wherein any Z, W, X, and/or Y independently comprises a sulphur atom, can be present in one or both oligonucleotide strands of the siNA duplex, for example, in the sense strand, the antisense strand, or both strands. The siNA molecules of the invention can comprise one or more (e.g., about 1, 2, 3, 4, 5, 6, 7, 8, 9, 10, or more) chemically-modified internucleotide linkages having Formula I at the 3′-end, the 5′-end, or both of the 3′ and 5′-ends of the sense strand, the antisense strand, or both strands. For example, an exemplary siNA molecule of the invention can comprise about 1 to about 5 or more (e.g., about 1, 2, 3, 4, 5, or more) chemically-modified internucleotide linkages having Formula I at the 5′-end of the sense strand, the antisense strand, or both strands. In another non-limiting example, an exemplary siNA molecule of the invention can comprise one or more (e.g., about 1, 2, 3, 4, 5, 6, 7, 8, 9, 10, or more) pyrimidine nucleotides with chemically-modified internucleotide linkages having Formula I in the sense strand, the antisense strand, or both strands. In yet another non-limiting example, an exemplary siNA molecule of the invention can comprise one or more (e.g., about 1, 2, 3, 4, 5, 6, 7, 8, 9, 10, or more) purine nucleotides with chemically-modified internucleotide linkages having Formula I in the sense strand, the antisense strand, or both strands. In another embodiment, a siNA molecule of the invention having internucleotide linkage(s) of Formula I also comprises a chemically-modified nucleotide or non-nucleotide having any of Formulae I-VII.

[0097] In one embodiment, the invention features a chemically-modified short interfering nucleic acid (siNA) molecule capable of mediating RNA interference (RNAi) inside a cell or reconstituted in vitro system, wherein the chemical modification comprises one or more (e.g., about 1, 2, 3, 4, 5, 6, 7, 8, 9, 10, or more) nucleotides or non-nucleotides having Formula II:

[chemical structure]

wherein each R3, R4, R5, R6, R7, R8, R10, R11 and R12 is independently H, OH, alkyl, substituted alkyl, alkaryl or aralkyl, F, Cl, Br, CN, CF3, OCF3, OCH3, OCN, O-alkyl, S-alkyl, N-alkyl, O-alkenyl, S-alkenyl, N-alkenyl, SO-alkyl, alkyl-OSH, alkyl-OH, O-alkyl-OH, O-alkyl-SH, S-alkyl-OH, S-alkyl-SH, alkyl-S-alkyl, alkyl-O-alkyl, ONO2, NO2, N3, NH2, aminoalkyl, aminoacid, aminoacyl, ONH2, O-aminoalkyl, O-aminoacid, O-aminoacyl, heterocycloalkyl, heterocycloalkaryl, aminoalkylamino, polyalklylamino, substituted silyl, or a group having any of Formula I, II, III, IV, V, VI and/or VII, any of which can be included in the structure of the siNA molecule or serve as a point of attachment to the siNA molecule; R9 is O, S, CH2, S═O, CHF, or CF2, and B is a nucleosidic base such as adenine, guanine, uracil, cytosine, thymine, 2-aminoadenosine, 5-methylcytosine, 2,6-diaminopurine, or any other non-naturally occurring base that can be complementary or non-complementary to target RNA or a non-nucleosidic base such as phenyl, naphthyl, 3-nitropyrrole, 5-nitroindole, nebularine, pyridone, pyridinone, or any other non-naturally occurring universal base that can be complementary or non-complementary to target RNA. In one embodiment, R3 and/or R7 comprises a conjugate moiety and a linker (e.g., a nucleotide or non-nucleotide linker as described herein or otherwise known in the art). Non-limiting examples of conjugate moieties include ligands for cellular receptors, such as peptides derived from naturally occurring protein ligands; protein localization sequences, including cellular ZIP code sequences; antibodies; nucleic acid aptamers; vitamins and other co-factors, such as folate and N-acetylgalactosamine; polymers, such as polyethyleneglycol (PEG); phospholipids; cholesterol; steroids, and polyamines, such as PEI, spermine or spermidine. In one embodiment, a nucleotide of the invention having Formula II is a 2′-deoxy-2′-fluoro nucleotide. In one embodiment, a nucleotide of the invention having Formula II is a 2′-O-methyl nucleotide. In one embodiment, a nucleotide of the invention having Formula II is a 2′-deoxy nucleotide.

[0098] The chemically-modified nucleotide or non-nucleotide of Formula II can be present in one or both oligonucleotide strands of the siNA duplex, for example in the sense strand, the antisense strand, or both strands. The siNA molecules of the invention can comprise one or more chemically-modified nucleotides or non-nucleotides of Formula II at the 3′-end, the 5′-end, or both of the 3′ and 5′-ends of the sense strand, the antisense strand, or both strands. For example, an exemplary siNA molecule of the invention can comprise about 1 to about 5 or more (e.g., about 1, 2, 3, 4, 5, or more) chemically-modified nucleotides or non-nucleotides of Formula II at the 5′-end of the sense strand, the antisense strand, or both strands. In another non-limiting example, an exemplary siNA molecule of the invention can comprise about 1 to about 5 or more (e.g., about 1, 2, 3, 4, 5, or more) chemically-modified nucleotides or non-nucleotides of Formula II at the 3′-end of the sense strand, the antisense strand, or both strands.

[0099] In one embodiment, the invention features a chemically-modified short interfering nucleic acid (siNA) molecule capable of mediating RNA interference (RNAi) inside a cell or reconstituted in vitro system, wherein the chemical modification comprises one or more (e.g., about 1, 2, 3, 4, 5, 6, 7, 8, 9, 10, or more) nucleotides or non-nucleotides having Formula III:

[chemical structure]

wherein each R3, R4, R5, R6, R7, R8, R10, R11 and R12 is independently H, OH, alkyl, substituted alkyl, alkaryl or aralkyl, F, Cl, Br, CN, CF3, OCF3, OCH3, OCN, O-alkyl, S-alkyl, N-alkyl, O-alkenyl, S-alkenyl, N-alkenyl, SO-alkyl, alkyl-OSH, alkyl-OH, O-alkyl-OH, O-alkyl-SH, S-alkyl-OH, S-alkyl-SH, alkyl-5-alkyl, alkyl-O-alkyl, ONO2, NO2, N3, NH2, aminoalkyl, aminoacid, aminoacyl, ONH2, O-aminoalkyl, O-aminoacid, O-aminoacyl, heterocycloalkyl, heterocycloalkaryl, aminoalkylamino, polyalklylamino, substituted silyl, or a group having any of Formula I, II, III, IV, V, VI and/or VII, any of which can be included in the structure of the siNA molecule or serve as a point of attachment to the siNA molecule; R9 is O, S, CH2, S═O, CHF, or CF2, and B is a nucleosidic base such as adenine, guanine, uracil, cytosine, thymine, 2-aminoadenosine, 5-methylcytosine, 2,6-diaminopurine, or any other non-naturally occurring base that can be employed to be complementary or non-complementary to target RNA or a non-nucleosidic base such as phenyl, naphthyl, 3-nitropyrrole, 5-nitroindole, nebularine, pyridone, pyridinone, or any other non-naturally occurring universal base that can be complementary or non-complementary to target RNA. In one embodiment, R3 and/or R7 comprises a conjugate moiety and a linker (e.g., a nucleotide or non-nucleotide linker as described herein or otherwise known in the art). Non-limiting examples of conjugate moieties include ligands for cellular receptors, such as peptides derived from naturally occurring protein ligands; protein localization sequences, including cellular ZIP code sequences; antibodies; nucleic acid aptamers; vitamins and other co-factors, such as folate and N-acetylgalactosamine; polymers, such as polyethyleneglycol (PEG); phospholipids; cholesterol; steroids, and polyamines, such as PEI, spermine or spermidine.

[0100] The chemically-modified nucleotide or non-nucleotide of Formula III can be present in one or both oligonucleotide strands of the siNA duplex, for example, in the sense strand, the antisense strand, or both strands. The siNA molecules of the invention can comprise one or more chemically-modified nucleotides or non-nucleotides of Formula III at the 3′-end, the 5′-end, or both of the 3′ and 5′-ends of the sense strand, the antisense strand, or both strands. For example, an exemplary siNA molecule of the invention can comprise about 1 to about 5 or more (e.g., about 1, 2, 3, 4, 5, or more) chemically-modified nucleotide(s) or non-nucleotide(s) of Formula III at the 5′-end of the sense strand, the antisense strand, or both strands. In another non-limiting example, an exemplary siNA molecule of the invention can comprise about 1 to about 5 or more (e.g., about 1, 2, 3, 4, 5, or more) chemically-modified nucleotide or non-nucleotide of Formula III at the 3′-end of the sense strand, the antisense strand, or both strands.

[0101] In another embodiment, a siNA molecule of the invention comprises a nucleotide having Formula II or III, wherein the nucleotide having Formula II or III is in an inverted configuration. For example, the nucleotide having Formula II or III is connected to the siNA construct in a 3′-3′,3′-2′,2′-3′, or 5′-5′ configuration, such as at the 3′-end, the 5′-end, or both of the 3′ and 5′-ends of one or both siNA strands.

[0102] In one embodiment, the invention features a chemically-modified short interfering nucleic acid (siNA) molecule capable of mediating RNA interference (RNAi) inside a cell or reconstituted in vitro system, wherein the chemical modification comprises a 5′-terminal phosphate group having Formula IV:

[chemical structure]

wherein each X and Y is independently O, S, N, alkyl, substituted alkyl, or alkylhalo; wherein each Z and W is independently O, S, N, alkyl, substituted alkyl, O-alkyl, S-alkyl, alkaryl, aralkyl, alkylhalo, or acetyl; and wherein W, X, Y and Z are optionally not all O and Y serves as a point of attachment to the siNA molecule.

[0103] In one embodiment, the invention features a siNA molecule having a 5′-terminal phosphate group having Formula IV on the SREBP1 target-complementary strand, for example, a strand complementary to a SREBP1 target RNA, wherein the siNA molecule comprises an all RNA siNA molecule. In another embodiment, the invention features a siNA molecule having a 5′-terminal phosphate group having Formula IV on the SREBP1 target-complementary strand wherein the siNA molecule also comprises about 1 to about 3 (e.g., about 1, 2, or 3) nucleotide 3′-terminal nucleotide overhangs having about 1 to about 4 (e.g., about 1, 2, 3, or 4) deoxyribonucleotides on the 3′-end of one or both strands. In another embodiment, a 5′-terminal phosphate group having Formula IV is present on the SREBP1 target-complementary strand of a siNA molecule of the invention, for example a siNA molecule having chemical modifications having any of Formulae I-VII.

[0104] In one embodiment, the invention features a chemically-modified short interfering nucleic acid (siNA) molecule capable of mediating RNA interference (RNAi) inside a cell or reconstituted in vitro system, wherein the chemical modification comprises one or more phosphorothioate internucleotide linkages. For example, in a non-limiting example, the invention features a chemically-modified short interfering nucleic acid (siNA) having about 1, 2, 3, 4, 5, 6, 7, 8 or more phosphorothioate internucleotide linkages in one siNA strand. In yet another embodiment, the invention features a chemically-modified short interfering nucleic acid (siNA) individually having about 1, 2, 3, 4, 5, 6, 7, 8 or more phosphorothioate internucleotide linkages in both siNA strands. The phosphorothioate internucleotide linkages can be present in one or both oligonucleotide strands of the siNA duplex, for example in the sense strand, the antisense strand, or both strands. The siNA molecules of the invention can comprise one or more phosphorothioate internucleotide linkages at the 3′-end, the 5′-end, or both of the 3′- and 5′-ends of the sense strand, the antisense strand, or both strands. For example, an exemplary siNA molecule of the invention can comprise about 1 to about 5 or more (e.g., about 1, 2, 3, 4, 5, or more) consecutive phosphorothioate internucleotide linkages at the 5′-end of the sense strand, the antisense strand, or both strands. In another non-limiting example, an exemplary siNA molecule of the invention can comprise one or more (e.g., about 1, 2, 3, 4, 5, 6, 7, 8, 9, 10, or more) pyrimidine phosphorothioate internucleotide linkages in the sense strand, the antisense strand, or both strands. In yet another non-limiting example, an exemplary siNA molecule of the invention can comprise one or more (e.g., about 1, 2, 3, 4, 5, 6, 7, 8, 9, 10, or more) purine phosphorothioate internucleotide linkages in the sense strand, the antisense strand, or both strands.

[0105] Each strand of the double stranded siNA molecule can have one or more chemical modifications such that each strand comprises a different pattern of chemical modifications. Several non-limiting examples of modification schemes that could give rise to different patterns of modifications are provided herein.

[0106] In one embodiment, the invention features a siNA molecule, wherein the sense strand comprises one or more, for example, about 1, 2, 3, 4, 5, 6, 7, 8, 9, 10, or more phosphorothioate internucleotide linkages, and/or one or more (e.g., about 1, 2, 3, 4, 5, 6, 7, 8, 9, 10 or more) 2′-deoxy, 2′-O-methyl, 2′-deoxy-2′-fluoro, 2′-O-trifluoromethyl, 2′-O-ethyl-trifluoromethoxy, 2′-O-difluoromethoxy-ethoxy and/or about one or more (e.g., about 1, 2, 3, 4, 5, 6, 7, 8, 9, 10 or more) universal base modified nucleotides, and optionally a terminal cap molecule at the 3′-end, the 5′-end, or both of the 3′- and 5′-ends of the sense strand; and wherein the antisense strand comprises about 1 to about 10 or more, specifically about 1, 2, 3, 4, 5, 6, 7, 8, 9, 10, or more phosphorothioate internucleotide linkages, and/or one or more (e.g., about 1, 2, 3, 4, 5, 6, 7, 8, 9, 10 or more) 2′-deoxy, 2′-O-methyl, 2′-deoxy-2′-fluoro, 2′-O-trifluoromethyl, 2′-O-ethyl-trifluoromethoxy, 2′-O-difluoromethoxy-ethoxy, 4′-thio and/or one or more (e.g., about 1, 2, 3, 4, 5, 6, 7, 8, 9, 10 or more) universal base modified nucleotides, and optionally a terminal cap molecule at the 3′-end, the 5′-end, or both of the 3′- and 5′-ends of the antisense strand. In another embodiment, one or more, for example about 1, 2, 3, 4, 5, 6, 7, 8, 9, 10, or more, pyrimidine nucleotides of the sense and/or antisense siNA strand are chemically-modified with 2′-deoxy, 2′-O-methyl, 2′-O-trifluoromethyl, 2′-O-ethyl-trifluoromethoxy, 2′-O-difluoromethoxy-ethoxy, 4′-thio and/or 2′-deoxy-2′-fluoro nucleotides, with or without one or more, for example about 1, 2, 3, 4, 5, 6, 7, 8, 9, 10, or more, phosphorothioate internucleotide linkages and/or a terminal cap molecule at the 3′-end, the 5′-end, or both of the 3′- and 5′-ends, being present in the same or different strand.

[0107] In another embodiment, the invention features a siNA molecule, wherein the sense strand comprises about 1 to about 5, specifically about 1, 2, 3, 4, or 5 phosphorothioate internucleotide linkages, and/or one or more (e.g., about 1, 2, 3, 4, 5, or more) 2′-deoxy, 2′-O-methyl, 2′-deoxy-2′-fluoro, 2′-O-trifluoromethyl, 2′-O-ethyl-trifluoromethoxy, 2′-O-difluoromethoxy-ethoxy, 4′-thio and/or one or more (e.g., about 1, 2, 3, 4, 5, or more) universal base modified nucleotides, and optionally a terminal cap molecule at the 3-end, the 5′-end, or both of the 3′- and 5′-ends of the sense strand; and wherein the antisense strand comprises about 1 to about 5 or more, specifically about 1, 2, 3, 4, 5, or more phosphorothioate internucleotide linkages, and/or one or more (e.g., about 1, 2, 3, 4, 5, 6, 7, 8, 9, 10 or more) 2′-deoxy, 2′-O-methyl, 2′-deoxy-2′-fluoro, 2′-O-trifluoromethyl, 2′-O-ethyl-trifluoromethoxy, 2′-O-difluoromethoxy-ethoxy, 4′-thio and/or one or more (e.g., about 1, 2, 3, 4, 5, 6, 7, 8, 9, 10 or more) universal base modified nucleotides, and optionally a terminal cap molecule at the 3′-end, the 5′-end, or both of the 3′- and 5′-ends of the antisense strand. In another embodiment, one or more, for example about 1, 2, 3, 4, 5, 6, 7, 8, 9, 10, or more, pyrimidine nucleotides of the sense and/or antisense siNA strand are chemically-modified with 2′-deoxy, 2′-O-methyl, 2′-O-trifluoromethyl, 2′-O-ethyl-trifluoromethoxy, 2′-O-difluoromethoxy-ethoxy, 4′-thio and/or 2′-deoxy-2′-fluoro nucleotides, with or without about 1 to about 5 or more, for example about 1, 2, 3, 4, 5, or more phosphorothioate internucleotide linkages and/or a terminal cap molecule at the 3′-end, the 5′-end, or both of the 3′- and 5′-ends, being present in the same or different strand.

[0108] In one embodiment, the invention features a siNA molecule, wherein the antisense strand comprises one or more, for example, about 1, 2, 3, 4, 5, 6, 7, 8, 9, 10, or more phosphorothioate internucleotide linkages, and/or about one or more (e.g., about 1, 2, 3, 4, 5, 6, 7, 8, 9, 10 or more) 2′-deoxy, 2′-O-methyl, 2′-deoxy-2′-fluoro, 2′-O-trifluoromethyl, 2′-O-ethyl-trifluoromethoxy, 2′-O-difluoromethoxy-ethoxy, 4′-thio and/or one or more (e.g., about 1, 2, 3, 4, 5, 6, 7, 8, 9, 10 or more) universal base modified nucleotides, and optionally a terminal cap molecule at the 3′-end, the 5′-end, or both of the 3′- and 5′-ends of the sense strand; and wherein the antisense strand comprises about 1 to about 10 or more, specifically about 1, 2, 3, 4, 5, 6, 7, 8, 9, 10 or more phosphorothioate internucleotide linkages, and/or one or more (e.g., about 1, 2, 3, 4, 5, 6, 7, 8, 9, 10 or more) 2′-deoxy, 2′-O-methyl, 2′-deoxy-2′-fluoro, 2′-O-trifluoromethyl, 2′-O-ethyl-trifluoromethoxy, 2′-O-difluoromethoxy-ethoxy, 4′-thio and/or one or more (e.g., about 1, 2, 3, 4, 5, 6, 7, 8, 9, 10 or more) universal base modified nucleotides, and optionally a terminal cap molecule at the 3′-end, the 5′-end, or both of the 3′- and 5′-ends of the antisense strand. In another embodiment, one or more, for example about 1, 2, 3, 4, 5, 6, 7, 8, 9, 10 or more pyrimidine nucleotides of the sense and/or antisense siNA strand are chemically-modified with 2′-deoxy, 2′-O-methyl, 2′-O-trifluoromethyl, 2′-O-ethyl-trifluoromethoxy, 2′-O-difluoromethoxy-ethoxy, 4′-thio and/or 2′-deoxy-2′-fluoro nucleotides, with or without one or more, for example, about 1, 2, 3, 4, 5, 6, 7, 8, 9, 10 or more phosphorothioate internucleotide linkages and/or a terminal cap molecule at the 3′-end, the 5′-end, or both of the 3′ and 5′-ends, being present in the same or different strand.

[0109] In another embodiment, the invention features a siNA molecule, wherein the antisense strand comprises about 1 to about 5 or more, specifically about 1, 2, 3, 4, 5 or more phosphorothioate internucleotide linkages, and/or one or more (e.g., about 1, 2, 3, 4, 5, 6, 7, 8, 9, 10 or more) 2′-deoxy, 2′-O-methyl, 2′-deoxy-2′-fluoro, 2′-O-trifluoromethyl, 2′-O-ethyl-trifluoromethoxy, 2′-O-difluoromethoxy-ethoxy, 4′-thio and/or one or more (e.g., about 1, 2, 3, 4, 5, 6, 7, 8, 9, 10 or more) universal base modified nucleotides, and optionally a terminal cap molecule at the 3′-end, the 5′-end, or both of the 3′- and 5′-ends of the sense strand; and wherein the antisense strand comprises about 1 to about 5 or more, specifically about 1, 2, 3, 4, 5 or more phosphorothioate internucleotide linkages, and/or one or more (e.g., about 1, 2, 3, 4, 5, 6, 7, 8, 9, 10 or more) 2′-deoxy, 2′-O-methyl, 2′-deoxy-2′-fluoro, 2′-O-trifluoromethyl, 2′-O-ethyl-trifluoromethoxy, 2′-O-difluoromethoxy-ethoxy, 4′-thio and/or one or more (e.g., about 1, 2, 3, 4, 5, 6, 7, 8, 9, 10 or more) universal base modified nucleotides, and optionally a terminal cap molecule at the 3′-end, the 5′-end, or both of the 3′- and 5′-ends of the antisense strand. In another embodiment, one or more, for example about 1, 2, 3, 4, 5, 6, 7, 8, 9, 10 or more pyrimidine nucleotides of the sense and/or antisense siNA strand are chemically-modified with 2′-deoxy, 2′-O-methyl, 2′-O-trifluoromethyl, 2′-O-ethyl-trifluoromethoxy, 2′-O-difluoromethoxy-ethoxy, 4′-thio and/or 2′-deoxy-2′-fluoro nucleotides, with or without about 1 to about 5, for example about 1, 2, 3, 4, 5 or more phosphorothioate internucleotide linkages and/or a terminal cap molecule at the 3′-end, the 5′-end, or both of the 3′- and 5′-ends, being present in the same or different strand.

[0110] In one embodiment, the invention features a chemically-modified short interfering nucleic acid (siNA) molecule having about 1 to about 5 or more (specifically about 1, 2, 3, 4, 5 or more) phosphorothioate internucleotide linkages in each strand of the siNA molecule.

[0111] In another embodiment, the invention features a siNA molecule comprising 2′-5′ internucleotide linkages. The 2′-5′ internucleotide linkage(s) can be at the 3′-end, the 5′-end, or both of the 3′- and 5′-ends of one or both siNA sequence strands. In addition, the 2′-5′ internucleotide linkage(s) can be present at various other positions within one or both siNA sequence strands, for example, about 1, 2, 3, 4, 5, 6, 7, 8, 9, 10, or more including every internucleotide linkage of a pyrimidine nucleotide in one or both strands of the siNA molecule can comprise a 2′-5′ internucleotide linkage, or about 1, 2, 3, 4, 5, 6, 7, 8, 9, 10, or more including every internucleotide linkage of a purine nucleotide in one or both strands of the siNA molecule can comprise a 2′-5′ internucleotide linkage.

[0112] In another embodiment, a chemically-modified siNA molecule of the invention comprises a duplex having two strands, one or both of which can be chemically-modified, wherein each strand is independently about 15 to about 30 (e.g., about 15, 16, 17, 18, 19, 20, 21, 22, 23, 24, 25, 26, 27, 28, 29, or 30) nucleotides in length, wherein the duplex has about 15 to about 30 (e.g., about 15, 16, 17, 18, 19, 20, 21, 22, 23, 24, 25, 26, 27, 28, 29, or 30) base pairs, and wherein the chemical modification comprises a structure having any of Formulae I-VII. For example, an exemplary chemically-modified siNA molecule of the invention comprises a duplex having two strands, one or both of which can be chemically-modified with a chemical modification having any of Formulae I-VII or any combination thereof, wherein each strand consists of about 21 nucleotides, each having a 2-nucleotide 3′-terminal nucleotide overhang, and wherein the duplex has about 19 base pairs. In another embodiment, a siNA molecule of the invention comprises a single stranded hairpin structure, wherein the siNA is about 36 to about 70 (e.g., about 36, 40, 45, 50, 55, 60, 65, or 70) nucleotides in length having about 15 to about 30 (e.g., about 15, 16, 17, 18, 19, 20, 21, 22, 23, 24, 25, 26, 27, 28, 29, or 30) base pairs, and wherein the siNA can include a chemical modification comprising a structure having any of Formulae I-VII or any combination thereof. For example, an exemplary chemically-modified siNA molecule of the invention comprises a linear oligonucleotide having about 42 to about 50 (e.g., about 42, 43, 44, 45, 46, 47, 48, 49, or 50) nucleotides that is chemically-modified with a chemical modification having any of Formulae I-VII or any combination thereof, wherein the linear oligonucleotide forms a hairpin structure having about 19 to about 21 (e.g., 19, 20, or 21) base pairs and a 2-nucleotide 3′-terminal nucleotide overhang. In another embodiment, a linear hairpin siNA molecule of the invention contains a stem loop motif, wherein the loop portion of the siNA molecule is biodegradable. For example, a linear hairpin siNA molecule of the invention is designed such that degradation of the loop portion of the siNA molecule in vivo can generate a double-stranded siNA molecule with 3′-terminal overhangs, such as 3′-terminal nucleotide overhangs comprising about 2 nucleotides.

[0113] In another embodiment, a siNA molecule of the invention comprises a hairpin structure, wherein the siNA is about 25 to about 50 (e.g., about 25, 26, 27, 28, 29, 30, 31, 32, 33, 34, 35, 36, 37, 38, 39, 40, 41, 42, 43, 44, 45, 46, 47, 48, 49, or 50) nucleotides in length having about 3 to about 25 (e.g., about 3, 4, 5, 6, 7, 8, 9, 10, 11, 12, 13, 14, 15, 16, 17, 18, 19, 20, 21, 22, 23, 24, or 25) base pairs, and wherein the siNA can include one or more chemical modifications comprising a structure having any of Formulae I-VII or any combination thereof. For example, an exemplary chemically-modified siNA molecule of the invention comprises a linear oligonucleotide having about 25 to about 35 (e.g., about 25, 26, 27, 28, 29, 30, 31, 32, 33, 34, or 35) nucleotides that is chemically-modified with one or more chemical modifications having any of Formulae I-VII or any combination thereof, wherein the linear oligonucleotide forms a hairpin structure having about 3 to about 25 (e.g., about 3, 4, 5, 6, 7, 8, 9, 10, 11, 12, 13, 14, 15, 16, 17, 18, 19, 20, 21, 22, 23, 24, or 25) base pairs and a 5′-terminal phosphate group that can be chemically modified as described herein (for example a 5′-terminal phosphate group having Formula IV). In another embodiment, a linear hairpin siNA molecule of the invention contains a stem loop motif, wherein the loop portion of the siNA molecule is biodegradable. In one embodiment, a linear hairpin siNA molecule of the invention comprises a loop portion comprising a non-nucleotide linker.

[0114] In another embodiment, a siNA molecule of the invention comprises an asymmetric hairpin structure, wherein the siNA is about 25 to about 50 (e.g., about 25, 26, 27, 28, 29, 30, 31, 32, 33, 34, 35, 36, 37, 38, 39, 40, 41, 42, 43, 44, 45, 46, 47, 48, 49, or 50) nucleotides in length having about 3 to about 25 (e.g., about 3, 4, 5, 6, 7, 8, 9, 10, 11, 12, 13, 14, 15, 16, 17, 18, 19, 20, 21, 22, 23, 24, or 25) base pairs, and wherein the siNA can include one or more chemical modifications comprising a structure having any of Formulae I-VII or any combination thereof. For example, an exemplary chemically-modified siNA molecule of the invention comprises a linear oligonucleotide having about 25 to about 35 (e.g., about 25, 26, 27, 28, 29, 30, 31, 32, 33, 34, or 35) nucleotides that is chemically-modified with one or more chemical modifications having any of Formulae I-VII or any combination thereof, wherein the linear oligonucleotide forms an asymmetric hairpin structure having about 3 to about 25 (e.g., about 3, 4, 5, 6, 7, 8, 9, 10, 11, 12, 13, 14, 15, 16, 17, 18, 19, 20, 21, 22, 23, 24, or 25) base pairs and a 5′-terminal phosphate group that can be chemically modified as described herein (for example a 5′-terminal phosphate group having Formula IV). In one embodiment, an asymmetric hairpin siNA molecule of the invention contains a stem loop motif, wherein the loop portion of the siNA molecule is biodegradable. In another embodiment, an asymmetric hairpin siNA molecule of the invention comprises a loop portion comprising a non-nucleotide linker.

[0115] In another embodiment, a siNA molecule of the invention comprises an asymmetric double stranded structure having separate polynucleotide strands comprising sense and antisense regions, wherein the antisense region is about 15 to about 30 (e.g., about 15, 16, 17, 18, 19, 20, 21, 22, 23, 24, 25, 26, 27, 28, 29, or 30) nucleotides in length, wherein the sense region is about 3 to about 25 (e.g., about 3, 4, 5, 6, 7, 8, 9, 10, 11, 12, 13, 14, 15, 16, 17, 18, 19, 20, 21, 22, 23, 24, or 25) nucleotides in length, wherein the sense region and the antisense region have at least 3 complementary nucleotides, and wherein the siNA can include one or more chemical modifications comprising a structure having any of Formulae I-VII or any combination thereof. For example, an exemplary chemically-modified siNA molecule of the invention comprises an asymmetric double stranded structure having separate polynucleotide strands comprising sense and antisense regions, wherein the antisense region is about 18 to about 23 (e.g., about 18, 19, 20, 21, 22, or 23) nucleotides in length and wherein the sense region is about 3 to about 15 (e.g., about 3, 4, 5, 6, 7, 8, 9, 10, 11, 12, 13, 14, or 15) nucleotides in length, wherein the sense region the antisense region have at least 3 complementary nucleotides, and wherein the siNA can include one or more chemical modifications comprising a structure having any of Formulae I-VII or any combination thereof. In another embodiment, the asymmetric double stranded siNA molecule can also have a 5′-terminal phosphate group that can be chemically modified as described herein (for example a 5′-terminal phosphate group having Formula IV).

[0116] In another embodiment, a siNA molecule of the invention comprises a circular nucleic acid molecule, wherein the siNA is about 38 to about 70 (e.g., about 38, 40, 45, 50, 55, 60, 65, or 70) nucleotides in length having about 15 to about 30 (e.g., about 15, 16, 17, 18, 19, 20, 21, 22, 23, 24, 25, 26, 27, 28, 29, or 30) base pairs, and wherein the siNA can include a chemical modification, which comprises a structure having any of Formulae I-VII or any combination thereof. For example, an exemplary chemically-modified siNA molecule of the invention comprises a circular oligonucleotide having about 42 to about 50 (e.g., about 42, 43, 44, 45, 46, 47, 48, 49, or 50) nucleotides that is chemically-modified with a chemical modification having any of Formulae I-VII or any combination thereof, wherein the circular oligonucleotide forms a dumbbell shaped structure having about 19 base pairs and 2 loops.

[0117] In another embodiment, a circular siNA molecule of the invention contains two loop motifs, wherein one or both loop portions of the siNA molecule is biodegradable. For example, a circular siNA molecule of the invention is designed such that degradation of the loop portions of the siNA molecule in vivo can generate a double-stranded siNA molecule with 3′-terminal overhangs, such as 3′-terminal nucleotide overhangs comprising about 2 nucleotides.

[0118] In one embodiment, a siNA molecule of the invention comprises at least one (e.g., about 1, 2, 3, 4, 5, 6, 7, 8, 9, 10, or more) abasic moiety, for example a compound having Formula V:

[chemical structure]

wherein each R3, R4, R5, R6, R7, R8, R10, R11, R12, and R13 is independently H, OH, alkyl, substituted alkyl, alkaryl or aralkyl, F, Cl, Br, CN, CF3, OCF3, OCH3, OCN, O-alkyl, S-alkyl, N-alkyl, O-alkenyl, S-alkenyl, N-alkenyl, SO-alkyl, alkyl-OSH, alkyl-OH, O-alkyl-OH, O-alkyl-SH, S-alkyl-OH, S-alkyl-SH, alkyl-S-alkyl, alkyl-O-alkyl, ONO2, NO2, N3, NH2, aminoalkyl, aminoacid, aminoacyl, ONH2, O-aminoalkyl, O-aminoacid, O-aminoacyl, heterocycloalkyl, heterocycloalkaryl, aminoalkylamino, polyalklylamino, substituted silyl, or a group having any of Formula I, II, III, IV, V, VI and/or VII, any of which can be included in the structure of the siNA molecule or serve as a point of attachment to the siNA molecule; R9 is O, S, CH2, S═O, CHF, or CF2. In one embodiment, R3 and/or R7 comprises a conjugate moiety and a linker (e.g., a nucleotide or non-nucleotide linker as described herein or otherwise known in the art). Non-limiting examples of conjugate moieties include ligands for cellular receptors, such as peptides derived from naturally occurring protein ligands; protein localization sequences, including cellular ZIP code sequences; antibodies; nucleic acid aptamers; vitamins and other co-factors, such as folate and N-acetylgalactosamine; polymers, such as polyethyleneglycol (PEG); phospholipids; cholesterol; steroids, and polyamines, such as PEI, spermine or spermidine.

[0119] In one embodiment, a siNA molecule of the invention comprises at least one (e.g., about 1, 2, 3, 4, 5, 6, 7, 8, 9, 10, or more) inverted abasic moiety, for example a compound having Formula VI:

[chemical structure]

wherein each R3, R4, R5, R6, R7, R8, R10, R11, R12, and R13 is independently H, OH, alkyl, substituted alkyl, alkaryl or aralkyl, F, Cl, Br, CN, CF3, OCF3, OCH3, OCN, O-alkyl, S-alkyl, N-alkyl, O-alkenyl, S-alkenyl, N-alkenyl, SO-alkyl, alkyl-OSH, alkyl-OH, O-alkyl-OH, O-alkyl-SH, S-alkyl-OH, S-alkyl-SH, alkyl-5-alkyl, alkyl-O-alkyl, ONO2, NO2, N3, NH2, aminoalkyl, aminoacid, aminoacyl, ONH2, O-aminoalkyl, O-aminoacid, O-aminoacyl, heterocycloalkyl, heterocycloalkaryl, aminoalkylamino, polyalklylamino, substituted silyl, or a group having any of Formula I, II, III, IV, V, VI and/or VII, any of which can be included in the structure of the siNA molecule or serve as a point of attachment to the siNA molecule; R9 is O, S, CH2, S═O, CHF, or CF2, and either R2, R3, R8 or R13 serve as points of attachment to the siNA molecule of the invention. In one embodiment, R3 and/or R7 comprises a conjugate moiety and a linker (e.g., a nucleotide or non-nucleotide linker as described herein or otherwise known in the art). Non-limiting examples of conjugate moieties include ligands for cellular receptors, such as peptides derived from naturally occurring protein ligands; protein localization sequences, including cellular ZIP code sequences; antibodies; nucleic acid aptamers; vitamins and other co-factors, such as folate and N-acetylgalactosamine; polymers, such as polyethyleneglycol (PEG); phospholipids; cholesterol; steroids, and polyamines, such as PEI, spermine or spermidine.

[0120] In another embodiment, a siNA molecule of the invention comprises at least one (e.g., about 1, 2, 3, 4, 5, 6, 7, 8, 9, 10, or more) substituted polyalkyl moieties, for example a compound having Formula VII:

[chemical structure]

wherein each n is independently an integer from 1 to 12, each R1, R2 and R3 is independently H, OH, alkyl, substituted alkyl, alkaryl or aralkyl, F, Cl, Br, CN, CF3, OCF3, OCH3, OCN, O-alkyl, S-alkyl, N-alkyl, O-alkenyl, S-alkenyl, N-alkenyl, SO-alkyl, alkyl-OSH, alkyl-OH, O-alkyl-OH, O-alkyl-SH, S-alkyl-OH, S-alkyl-SH, alkyl-S-alkyl, alkyl-O-alkyl, ONO2, NO2, N3, NH2, aminoalkyl, aminoacid, aminoacyl, ONH2, O-aminoalkyl, O-aminoacid, O-aminoacyl, heterocycloalkyl, heterocycloalkaryl, aminoalkylamino, polyalklylamino, substituted silyl, or a group having any of Formula I, II, III, IV, V, VI and/or VII, any of which can be included in the structure of the siNA molecule or serve as a point of attachment to the siNA molecule. In one embodiment, R3 and/or R1 comprises a conjugate moiety and a linker (e.g., a nucleotide or non-nucleotide linker as described herein or otherwise known in the art). Non-limiting examples of conjugate moieties include ligands for cellular receptors, such as peptides derived from naturally occurring protein ligands; protein localization sequences, including cellular ZIP code sequences; antibodies; nucleic acid aptamers; vitamins and other co-factors, such as folate and N-acetylgalactosamine; polymers, such as polyethyleneglycol (PEG); phospholipids; cholesterol; steroids, and polyamines, such as PEI, spermine or spermidine.

[0121] By “ZIP code” sequences is meant, any peptide or protein sequence that is involved in cellular topogenic signaling mediated transport (see for example Ray et al., 2004, Science, 306(1501): 1505).

[0122] Each nucleotide within the double stranded siNA molecule can independently have a chemical modification comprising the structure of any of Formulae I-VIII. Thus, in one embodiment, one or more nucleotide positions of a siNA molecule of the invention comprises a chemical modification having structure of any of Formulae I-VII or any other modification herein. In one embodiment, each nucleotide position of a siNA molecule of the invention comprises a chemical modification having structure of any of Formulae I-VII or any other modification herein.

[0123] In one embodiment, one or more nucleotide positions of one or both strands of a double stranded siNA molecule of the invention comprises a chemical modification having structure of any of Formulae 1-VII or any other modification herein. In one embodiment, each nucleotide position of one or both strands of a double stranded siNA molecule of the invention comprises a chemical modification having structure of any of Formulae I-VII or any other modification herein.

[0124] In another embodiment, the invention features a compound having Formula VII, wherein R1 and R2 are hydroxyl (OH) groups, n=1, and R3 comprises O and is the point of attachment to the 3′-end, the 5′-end, or both of the 3′ and 5′-ends of one or both strands of a double-stranded siNA molecule of the invention or to a single-stranded siNA molecule of the invention. This modification is referred to herein as “glyceryl” (for example modification 6 in FIG. 10).

[0125] In another embodiment, a chemically modified nucleoside or non-nucleoside (e.g. a moiety having any of Formula V, VI or VII) of the invention is at the 3′-end, the 5′-end, or both of the 3′ and 5′-ends of a siNA molecule of the invention. For example, chemically modified nucleoside or non-nucleoside (e.g., a moiety having Formula V, VI or VII) can be present at the 3′-end, the 5′-end, or both of the 3′ and 5′-ends of the antisense strand, the sense strand, or both antisense and sense strands of the siNA molecule. In one embodiment, the chemically modified nucleoside or non-nucleoside (e.g., a moiety having Formula V, VI or VII) is present at the 5′-end and 3′-end of the sense strand and the 3′-end of the antisense strand of a double stranded siNA molecule of the invention. In one embodiment, the chemically modified nucleoside or non-nucleoside (e.g., a moiety having Formula V, VI or VII) is present at the terminal position of the 5′-end and 3′-end of the sense strand and the 3′-end of the antisense strand of a double stranded siNA molecule of the invention. In one embodiment, the chemically modified nucleoside or non-nucleoside (e.g., a moiety having Formula V, VI or VII) is present at the two terminal positions of the 5′-end and 3′-end of the sense strand and the 3′-end of the antisense strand of a double stranded siNA molecule of the invention. In one embodiment, the chemically modified nucleoside or non-nucleoside (e.g., a moiety having Formula V, VI or VII) is present at the penultimate position of the 5′-end and 3′-end of the sense strand and the 3′-end of the antisense strand of a double stranded siNA molecule of the invention. In addition, a moiety having Formula VII can be present at the 3′-end or the 5′-end of a hairpin siNA molecule as described herein.

[0126] In another embodiment, a siNA molecule of the invention comprises an abasic residue having Formula V or VI, wherein the abasic residue having Formula VI or VI is connected to the siNA construct in a 3′-3′,3′-2′,2′-3′, or 5′-5′ configuration, such as at the 3′-end, the 5′-end, or both of the 3′ and 5′-ends of one or both siNA strands.

[0127] In one embodiment, a siNA molecule of the invention comprises one or more (e.g., about 1, 2, 3, 4, 5, 6, 7, 8, 9, 10, or more) locked nucleic acid (LNA) nucleotides, for example, at the 5′-end, the 3′-end, both of the 5′ and 3′-ends, or any combination thereof, of the siNA molecule.

[0128] In one embodiment, a siNA molecule of the invention comprises one or more (e.g., about 1, 2, 3, 4, 5, 6, 7, 8, 9, 10, or more) 4′-thio nucleotides, for example, at the 5′-end, the 3′-end, both of the 5′ and 3′-ends, or any combination thereof, of the siNA molecule.

[0129] In another embodiment, a siNA molecule of the invention comprises one or more (e.g., about 1, 2, 3, 4, 5, 6, 7, 8, 9, 10, or more) acyclic nucleotides, for example, at the 5′-end, the 3′-end, both of the 5′ and 3′-ends, or any combination thereof, of the siNA molecule.

[0130] In one embodiment, a chemically-modified short interfering nucleic acid (siNA) molecule of the invention comprises a sense strand or sense region having one or more (e.g., 1, 2, 3, 4, 5, 6, 7, 8, 9, 10, 11, 12, 13, 14 15, 16, 17, 18, 19, 20, 21, 22, 23, 24, 25, 26, 27, 28, 29, 30 or more) 2′-O-alkyl (e.g. 2′-O-methyl), 2′-deoxy-2′-fluoro, 2′-deoxy, FANA, or abasic chemical modifications or any combination thereof.

[0131] In one embodiment, a chemically-modified short interfering nucleic acid (siNA) molecule of the invention comprises an antisense strand or antisense region having one or more (e.g., 1, 2, 3, 4, 5, 6, 7, 8, 9, 10, 11, 12, 13, 14 15, 16, 17, 18, 19, 20, 21, 22, 23, 24, 25, 26, 27, 28, 29, 30 or more) 2′-O-alkyl (e.g. 2′-O-methyl), 2′-deoxy-2′-fluoro, 2′-deoxy, FANA, or abasic chemical modifications or any combination thereof.

[0132] In one embodiment, a chemically-modified short interfering nucleic acid (siNA) molecule of the invention comprises a sense strand or sense region and an antisense strand or antisense region, each having one or more (e.g., 1, 2, 3, 4, 5, 6, 7, 8, 9, 10, 11, 12, 13, 14 15, 16, 17, 18, 19, 20, 21, 22, 23, 24, 25, 26, 27, 28, 29, 30 or more) 2′-O-alkyl (e.g. 2′-O-methyl), 2′-deoxy-2′-fluoro, 2′-deoxy, FANA, or abasic chemical modifications or any combination thereof.

[0133] In one embodiment, the invention features a chemically-modified short interfering nucleic acid (siNA) molecule of the invention comprising a sense region, wherein any (e.g., one or more or all) pyrimidine nucleotides present in the sense region are 2′-deoxy-2′-fluoro pyrimidine nucleotides (e.g., wherein all pyrimidine nucleotides are 2′-deoxy-2′-fluoro pyrimidine nucleotides or alternately a plurality (ie. more than one) of pyrimidine nucleotides are 2′-deoxy-2′-fluoro pyrimidine nucleotides).

[0134] In one embodiment, the invention features a chemically-modified short interfering nucleic acid (siNA) molecule of the invention comprising a sense region, wherein any (e.g., one or more or all) pyrimidine nucleotides present in the sense region are FANA pyrimidine nucleotides (e.g., wherein all pyrimidine nucleotides are FANA pyrimidine nucleotides or alternately a plurality (ie. more than one) of pyrimidine nucleotides are FANA pyrimidine nucleotides).

[0135] In one embodiment, the invention features a chemically-modified short interfering nucleic acid (siNA) molecule of the invention comprising an antisense region, wherein any (e.g., one or more or all) pyrimidine nucleotides present in the antisense region are 2′-deoxy-2′-fluoro pyrimidine nucleotides (e.g., wherein all pyrimidine nucleotides are 2′-deoxy-2′-fluoro pyrimidine nucleotides or alternately a plurality (ie. more than one) of pyrimidine nucleotides are 2′-deoxy-2′-fluoro pyrimidine nucleotides).

[0136] In one embodiment, the invention features a chemically-modified short interfering nucleic acid (siNA) molecule of the invention comprising a sense region and an antisense region, wherein any (e.g., one or more or all) pyrimidine nucleotides present in the sense region and the antisense region are 2′-deoxy-2′-fluoro pyrimidine nucleotides (e.g., wherein all pyrimidine nucleotides are 2′-deoxy-2′-fluoro pyrimidine nucleotides or alternately a plurality (ie. more than one) of pyrimidine nucleotides are 2′-deoxy-2′-fluoro pyrimidine nucleotides).

[0137] In one embodiment, the invention features a chemically-modified short interfering nucleic acid (siNA) molecule of the invention comprising a sense region, wherein any (e.g., one or more or all) purine nucleotides present in the sense region are 2′-deoxy purine nucleotides (e.g., wherein all purine nucleotides are 2′-deoxy purine nucleotides or alternately a plurality (ie. more than one) of purine nucleotides are 2′-deoxy purine nucleotides).

[0138] In one embodiment, the invention features a chemically-modified short interfering nucleic acid (siNA) molecule of the invention comprising an antisense region, wherein any (e.g., one or more or all) purine nucleotides present in the antisense region are 2′-O-methyl purine nucleotides (e.g., wherein all purine nucleotides are 2′-O-methyl purine nucleotides or alternately a plurality (ie. more than one) of pyrimidine nucleotides are 2′-O-methyl purine nucleotides).

[0139] In one embodiment, the invention features a chemically-modified short interfering nucleic acid (siNA) molecule of the invention comprising a sense region, wherein any (e.g., one or more or all) pyrimidine nucleotides present in the sense region are 2′-deoxy-2′-fluoro pyrimidine nucleotides (e.g., wherein all pyrimidine nucleotides are 2′-deoxy-2′-fluoro pyrimidine nucleotides or alternately a plurality (ie. more than one) of pyrimidine nucleotides are 2′-deoxy-2′-fluoro pyrimidine nucleotides), and wherein any (e.g., one or more or all) purine nucleotides present in the sense region are 2′-deoxy purine nucleotides (e.g., wherein all purine nucleotides are 2′-deoxy purine nucleotides or alternately a plurality (ie. more than one) of purine nucleotides are 2′-deoxy purine nucleotides).

[0140] In one embodiment, the invention features a chemically-modified short interfering nucleic acid (siNA) molecule of the invention comprising a sense region, wherein any (e.g., one or more or all) pyrimidine nucleotides present in the sense region are 2′-deoxy-2′-fluoro, 4′-thio, 2′-O-trifluoromethyl, 2′-O-ethyl-trifluoromethoxy, or 2′-O-difluoromethoxy-ethoxy pyrimidine nucleotides (e.g., wherein all pyrimidine nucleotides are 2′-deoxy-2′-fluoro, 4′-thio, 2′-O-trifluoromethyl, 2′-O-ethyl-trifluoromethoxy, or 2′-O-difluoromethoxy-ethoxy pyrimidine nucleotides or alternately a plurality (ie. more than one) of pyrimidine nucleotides are 2′-deoxy-2′-fluoro, 4′-thio, 2′-O-trifluoromethyl, 2′-O-ethyl-trifluoromethoxy, or 2′-O-difluoromethoxy-ethoxy pyrimidine nucleotides), and wherein any (e.g., one or more or all) purine nucleotides present in the sense region are 2′-deoxy purine nucleotides (e.g., wherein all purine nucleotides are 2′-deoxy purine nucleotides or alternately a plurality (ie. more than one) of purine nucleotides are 2′-deoxy purine nucleotides), wherein any nucleotides comprising a 3′-terminal nucleotide overhang that are present in said sense region are 2′-deoxy nucleotides.

[0141] In one embodiment, the invention features a chemically-modified short interfering nucleic acid (siNA) molecule of the invention comprising a sense region, wherein any (e.g., one or more or all) pyrimidine nucleotides present in the sense region are 2′-deoxy-2′-fluoro, 4′-thio, 2′-O-trifluoromethyl, 2′-O-ethyl-trifluoromethoxy, or 2′-O-difluoromethoxy-ethoxy pyrimidine nucleotides (e.g., wherein all pyrimidine nucleotides are 2′-deoxy-2′-fluoro, 4′-thio, 2′-O-trifluoromethyl, 2′-O-ethyl-trifluoromethoxy, or 2′-O-difluoromethoxy-ethoxy pyrimidine nucleotides or alternately a plurality (ie. more than one) of pyrimidine nucleotides are 2′-deoxy-2′-fluoro, 4′-thio, 2′-O-trifluoromethyl, 2′-O-ethyl-trifluoromethoxy, or 2′-O-difluoromethoxy-ethoxy pyrimidine nucleotides), and wherein any (e.g., one or more or all) purine nucleotides present in the sense region are 2′-O-methyl purine nucleotides (e.g., wherein all purine nucleotides are 2′-O-methyl, 4′-thio, 2′-O-trifluoromethyl, 2′-O-ethyl-trifluoromethoxy, or 2′-O-difluoromethoxy-ethoxy purine nucleotides or alternately a plurality (ie. more than one) of purine nucleotides are 2′-O-methyl, 4′-thio, 2′-O-trifluoromethyl, 2′-O-ethyl-trifluoromethoxy, or 2′-O-difluoromethoxy-ethoxy purine nucleotides).

[0142] In one embodiment, the invention features a chemically-modified short interfering nucleic acid (siNA) molecule of the invention comprising a sense region, wherein any (e.g., one or more or all) pyrimidine nucleotides present in the sense region are 2′-deoxy-2′-fluoro, 4′-thio, 2′-O-trifluoromethyl, 2′-O-ethyl-trifluoromethoxy, or 2′-O-difluoromethoxy-ethoxy pyrimidine nucleotides (e.g., wherein all pyrimidine nucleotides are 2′-deoxy-2′-fluoro, 4′-thio, 2′-O-trifluoromethyl, 2′-O-ethyl-trifluoromethoxy, or 2′-O-difluoromethoxy-ethoxy pyrimidine nucleotides or alternately a plurality (ie. more than one) of pyrimidine nucleotides are 2′-deoxy-2′-fluoro, 4′-thio, 2′-O-trifluoromethyl, 2′-O-ethyl-trifluoromethoxy, or 2′-O-difluoromethoxy-ethoxy pyrimidine nucleotides), wherein any (e.g., one or more or all) purine nucleotides present in the sense region are 2′-O-methyl, 4′-thio, 2′-O-trifluoromethyl, 2′-O-ethyl-trifluoromethoxy, or 2′-O-difluoromethoxy-ethoxy purine nucleotides (e.g., wherein all purine nucleotides are 2′-O-methyl, 4′-thio, 2′-O-trifluoromethyl, 2′-O-ethyl-trifluoromethoxy, or 2′-O-difluoromethoxy-ethoxy purine nucleotides or alternately a plurality (ie. more than one) of purine nucleotides are 2′-O-methyl, 4′-thio, 2′-O-trifluoromethyl, 2′-O-ethyl-trifluoromethoxy, or 2′-O-difluoromethoxy-ethoxy purine nucleotides), and wherein any nucleotides comprising a 3′-terminal nucleotide overhang that are present in said sense region are 2′-deoxy nucleotides.

[0143] In one embodiment, the invention features a chemically-modified short interfering nucleic acid (siNA) molecule of the invention comprising an antisense region, wherein any (e.g., one or more or all) pyrimidine nucleotides present in the antisense region are 2′-deoxy-2′-fluoro, 4′-thio, 2′-O-trifluoromethyl, 2′-O-ethyl-trifluoromethoxy, or 2′-O-difluoromethoxy-ethoxy pyrimidine nucleotides (e.g., wherein all pyrimidine nucleotides are 2′-deoxy-2′-fluoro, 4′-thio, 2′-O-trifluoromethyl, 2′-O-ethyl-trifluoromethoxy, or 2′-O-difluoromethoxy-ethoxy pyrimidine nucleotides or alternately a plurality (ie. more than one) of pyrimidine nucleotides are 2′-deoxy-2′-fluoro, 4′-thio, 2′-O-trifluoromethyl, 2′-O-ethyl-trifluoromethoxy, or 2′-O-difluoromethoxy-ethoxy pyrimidine nucleotides), and wherein any (e.g., one or more or all) purine nucleotides present in the antisense region are 2′-O-methyl, 4′-thio, 2′-O-trifluoromethyl, 2′-O-ethyl-trifluoromethoxy, or 2′-O-difluoromethoxy-ethoxy purine nucleotides (e.g., wherein all purine nucleotides are 2′-O-methyl, 4′-thio, 2′-O-trifluoromethyl, 2′-O-ethyl-trifluoromethoxy, or 2′-O-difluoromethoxy-ethoxy purine nucleotides or alternately a plurality (ie. more than one) of purine nucleotides are 2′-O-methyl, 4′-thio, 2′-O-trifluoromethyl, 2′-O-ethyl-trifluoromethoxy, or 2′-O-difluoromethoxy-ethoxy purine nucleotides).

[0144] In one embodiment, the invention features a chemically-modified short interfering nucleic acid (siNA) molecule of the invention comprising an antisense region, wherein any (e.g., one or more or all) pyrimidine nucleotides present in the antisense region are 2′-deoxy-2′-fluoro, 4′-thio, 2′-O-trifluoromethyl, 2′-O-ethyl-trifluoromethoxy, or 2′-O-difluoromethoxy-ethoxy pyrimidine nucleotides (e.g., wherein all pyrimidine nucleotides are 2′-deoxy-2′-fluoro, 4′-thio, 2′-O-trifluoromethyl, 2′-O-ethyl-trifluoromethoxy, or 2′-O-difluoromethoxy-ethoxy pyrimidine nucleotides or alternately a plurality (ie. more than one) of pyrimidine nucleotides are 2′-deoxy-2′-fluoro, 4′-thio, 2′-O-trifluoromethyl, 2′-O-ethyl-trifluoromethoxy, or 2′-O-difluoromethoxy-ethoxy pyrimidine nucleotides), wherein any (e.g., one or more or all) purine nucleotides present in the antisense region are 2′-O-methyl, 4′-thio, 2′-O-trifluoromethyl, 2′-O-ethyl-trifluoromethoxy, or 2′-O-difluoromethoxy-ethoxy purine nucleotides (e.g., wherein all purine nucleotides are 2′-O-methyl, 4′-thio, 2′-O-trifluoromethyl, 2′-O-ethyl-trifluoromethoxy, or 2′-O-difluoromethoxy-ethoxy purine nucleotides or alternately a plurality (ie. more than one) of purine nucleotides are 2′-O-methyl, 4′-thio, 2′-O-trifluoromethyl, 2′-O-ethyl-trifluoromethoxy, or 2′-O-difluoromethoxy-ethoxy purine nucleotides), and wherein any nucleotides comprising a 3′-terminal nucleotide overhang that are present in said antisense region are 2′-deoxy nucleotides.

[0145] In one embodiment, the invention features a chemically-modified short interfering nucleic acid (siNA) molecule of the invention comprising an antisense region, wherein any (e.g., one or more or all) pyrimidine nucleotides present in the antisense region are 2′-deoxy-2′-fluoro, 4′-thio, 2′-O-trifluoromethyl, 2′-O-ethyl-trifluoromethoxy, or 2′-O-difluoromethoxy-ethoxy pyrimidine nucleotides (e.g., wherein all pyrimidine nucleotides are 2′-deoxy-2′-fluoro, 4′-thio, 2′-O-trifluoromethyl, 2′-O-ethyl-trifluoromethoxy, or 2′-O-difluoromethoxy-ethoxy pyrimidine nucleotides or alternately a plurality (ie. more than one) of pyrimidine nucleotides are 2′-deoxy-2′-fluoro, 4′-thio, 2′-O-trifluoromethyl, 2′-O-ethyl-trifluoromethoxy, or 2′-O-difluoromethoxy-ethoxy pyrimidine nucleotides), and wherein any (e.g., one or more or all) purine nucleotides present in the antisense region are 2′-deoxy purine nucleotides (e.g., wherein all purine nucleotides are 2′-deoxy purine nucleotides or alternately a plurality (ie. more than one) of purine nucleotides are 2′-deoxy purine nucleotides).

[0146] In one embodiment, the invention features a chemically-modified short interfering nucleic acid (siNA) molecule of the invention comprising an antisense region, wherein any (e.g., one or more or all) pyrimidine nucleotides present in the antisense region are 2′-deoxy-2′-fluoro, 4′-thio, 2′-O-trifluoromethyl, 2′-O-ethyl-trifluoromethoxy, or 2′-O-difluoromethoxy-ethoxy pyrimidine nucleotides (e.g., wherein all pyrimidine nucleotides are 2′-deoxy-2′-fluoro, 4′-thio, 2′-O-trifluoromethyl, 2′-O-ethyl-trifluoromethoxy, or 2′-O-difluoromethoxy-ethoxy pyrimidine nucleotides or alternately a plurality (ie. more than one) of pyrimidine nucleotides are 2′-deoxy-2′-fluoro, 4′-thio, 2′-O-trifluoromethyl, 2′-O-ethyl-trifluoromethoxy, or 2′-O-difluoromethoxy-ethoxy pyrimidine nucleotides), and wherein any (e.g., one or more or all) purine nucleotides present in the antisense region are 2′-O-methyl, 4′-thio, 2′-O-trifluoromethyl, 2′-O-ethyl-trifluoromethoxy, or 2′-O-difluoromethoxy-ethoxy purine nucleotides (e.g., wherein all purine nucleotides are 2′-O-methyl, 4′-thio, 2′-O-trifluoromethyl, 2′-O-ethyl-trifluoromethoxy, or 2′-O-difluoromethoxy-ethoxy purine nucleotides or alternately a plurality (ie. more than one) of purine nucleotides are 2′-O-methyl, 4′-thio, 2′-O-trifluoromethyl, 2′-O-ethyl-trifluoromethoxy, or 2′-O-difluoromethoxy-ethoxy purine nucleotides).

[0147] In one embodiment, the invention features a chemically-modified short interfering nucleic acid (siNA) molecule of the invention capable of mediating RNA interference (RNAi) inside a cell or reconstituted in vitro system comprising a sense region, wherein one or more pyrimidine nucleotides present in the sense region are 2′-deoxy-2′-fluoro, 4′-thio, 2′-O-trifluoromethyl, 2′-O-ethyl-trifluoromethoxy, or 2′-O-difluoromethoxy-ethoxy pyrimidine nucleotides (e.g., wherein all pyrimidine nucleotides are 2′-deoxy-2′-fluoro, 4′-thio, 2′-O-trifluoromethyl, 2′-O-ethyl-trifluoromethoxy, or 2′-O-difluoromethoxy-ethoxy pyrimidine nucleotides or alternately a plurality (ie. more than one) of pyrimidine nucleotides are 2′-deoxy-2′-fluoro, 4′-thio, 2′-O-trifluoromethyl, 2′-O-ethyl-trifluoromethoxy, or 2′-O-difluoromethoxy-ethoxy pyrimidine nucleotides), and one or more purine nucleotides present in the sense region are 2′-deoxy purine nucleotides (e.g., wherein all purine nucleotides are 2′-deoxy purine nucleotides or alternately a plurality (ie. more than one) of purine nucleotides are 2′-deoxy purine nucleotides), and an antisense region, wherein one or more pyrimidine nucleotides present in the antisense region are 2′-deoxy-2′-fluoro, 4′-thio, 2′-O-trifluoromethyl, 2′-O-ethyl-trifluoromethoxy, or 2′-O-difluoromethoxy-ethoxy pyrimidine nucleotides (e.g., wherein all pyrimidine nucleotides are 2′-deoxy-2′-fluoro, 4′-thio, 2′-O-trifluoromethyl, 2′-O-ethyl-trifluoromethoxy, or 2′-O-difluoromethoxy-ethoxy pyrimidine nucleotides or alternately a plurality (ie. more than one) of pyrimidine nucleotides are 2′-deoxy-2′-fluoro, 4′-thio, 2′-O-trifluoromethyl, 2′-O-ethyl-trifluoromethoxy, or 2′-O-difluoromethoxy-ethoxy pyrimidine nucleotides), and one or more purine nucleotides present in the antisense region are 2′-O-methyl, 4′-thio, 2′-O-trifluoromethyl, 2′-O-ethyl-trifluoromethoxy, or 2′-O-difluoromethoxy-ethoxy purine nucleotides (e.g., wherein all purine nucleotides are 2′-O-methyl, 4′-thio, 2′-O-trifluoromethyl, 2′-O-ethyl-trifluoromethoxy, or 2′-O-difluoromethoxy-ethoxy purine nucleotides or alternately a plurality (ie. more than one) of purine nucleotides are 2′-O-methyl, 4′-thio, 2′-O-trifluoromethyl, 2′-O-ethyl-trifluoromethoxy, or 2′-O-difluoromethoxy-ethoxy purine nucleotides). The sense region and/or the antisense region can have a terminal cap modification, such as any modification described herein or shown in FIG. 10, that is optionally present at the 3′-end, the 5′-end, or both of the 3′ and 5′-ends of the sense and/or antisense sequence. The sense and/or antisense region can optionally further comprise a 3′-terminal nucleotide overhang having about 1 to about 4 (e.g., about 1, 2, 3, or 4) 2′-deoxynucleotides. The overhang nucleotides can further comprise one or more (e.g., about 1, 2, 3, 4 or more) phosphorothioate, phosphonoacetate, and/or thiophosphonoacetate internucleotide linkages. Non-limiting examples of these chemically-modified siNAs are shown in FIGS. 4 and 5 and Table III herein. In any of these described embodiments, the purine nucleotides present in the sense region are alternatively 2′-O-methyl, 4′-thio, 2′-O-trifluoromethyl, 2′-O-ethyl-trifluoromethoxy, or 2′-O-difluoromethoxy-ethoxy purine nucleotides (e.g., wherein all purine nucleotides are 2′-O-methyl, 4′-thio, 2′-O-trifluoromethyl, 2′-O-ethyl-trifluoromethoxy, or 2′-O-difluoromethoxy-ethoxy purine nucleotides or alternately a plurality of purine nucleotides are 2′-O-methyl, 4′-thio, 2′-O-trifluoromethyl, 2′-O-ethyl-trifluoromethoxy, or 2′-O-difluoromethoxy-ethoxy purine nucleotides) and one or more purine nucleotides present in the antisense region are 2′-O-methyl, 4′-thio, 2′-O-trifluoromethyl, 2′-O-ethyl-trifluoromethoxy, or 2′-O-difluoromethoxy-ethoxy purine nucleotides (e.g., wherein all purine nucleotides are 2′-O-methyl, 4′-thio, 2′-O-trifluoromethyl, 2′-O-ethyl-trifluoromethoxy, or 2′-O-difluoromethoxy-ethoxy purine nucleotides or alternately a plurality (ie. more than one) of purine nucleotides are 2′-O-methyl, 4′-thio, 2′-O-trifluoromethyl, 2′-O-ethyl-trifluoromethoxy, or 2′-O-difluoromethoxy-ethoxy purine nucleotides). Also, in any of these embodiments, one or more purine nucleotides present in the sense region are alternatively purine ribonucleotides (e.g., wherein all purine nucleotides are purine ribonucleotides or alternately a plurality (ie. more than one) of purine nucleotides are purine ribonucleotides) and any purine nucleotides present in the antisense region are 2′-O-methyl, 4′-thio, 2′-O-trifluoromethyl, 2′-O-ethyl-trifluoromethoxy, or 2′-O-difluoromethoxy-ethoxy purine nucleotides (e.g., wherein all purine nucleotides are 2′-O-methyl, 4′-thio, 2′-O-trifluoromethyl, 2′-O-ethyl-trifluoromethoxy, or 2′-O-difluoromethoxy-ethoxy purine nucleotides or alternately a plurality (ie. more than one) of purine nucleotides are 2′-O-methyl, 4′-thio, 2′-O-trifluoromethyl, 2′-O-ethyl-trifluoromethoxy, or 2′-O-difluoromethoxy-ethoxy purine nucleotides). Additionally, in any of these embodiments, one or more purine nucleotides present in the sense region and/or present in the antisense region are alternatively selected from the group consisting of 2′-deoxy nucleotides, locked nucleic acid (LNA) nucleotides, 2′-methoxyethyl nucleotides, 4′-thionucleotides, 2′-O-trifluoromethyl nucleotides, 2′-O-ethyl-trifluoromethoxy nucleotides, 2′-O-difluoromethoxy-ethoxy nucleotides and 2′-O-methyl nucleotides (e.g., wherein all purine nucleotides are selected from the group consisting of 2′-deoxy nucleotides, locked nucleic acid (LNA) nucleotides, 2′-methoxyethyl nucleotides, 4′-thionucleotides, 2′-O-trifluoromethyl nucleotides, 2′-O-ethyl-trifluoromethoxy nucleotides, 2′-O-difluoromethoxy-ethoxy nucleotides and 2′-O-methyl nucleotides or alternately a plurality (ie. more than one) of purine nucleotides are selected from the group consisting of 2′-deoxy nucleotides, locked nucleic acid (LNA) nucleotides, 2′-methoxyethyl nucleotides, 4′-thionucleotides, 2′-O-trifluoromethyl nucleotides, 2′-O-ethyl-trifluoromethoxy nucleotides, 2′-O-difluoromethoxy-ethoxy nucleotides and 2′-O-methyl nucleotides).

[0148] In another embodiment, any modified nucleotides present in the siNA molecules of the invention, preferably in the antisense strand of the siNA molecules of the invention, but also optionally in the sense and/or both antisense and sense strands, comprise modified nucleotides having properties or characteristics similar to naturally occurring ribonucleotides. For example, the invention features siNA molecules including modified nucleotides having a Northern conformation (e.g., Northern pseudorotation cycle, see for example Saenger, Principles of Nucleic Acid Structure, Springer-Verlag ed., 1984) otherwise known as a “ribo-like” or “A-form helix” configuration. As such, chemically modified nucleotides present in the siNA molecules of the invention, preferably in the antisense strand of the siNA molecules of the invention, but also optionally in the sense and/or both antisense and sense strands, are resistant to nuclease degradation while at the same time maintaining the capacity to mediate RNAi. Non-limiting examples of nucleotides having a northern configuration include locked nucleic acid (LNA) nucleotides (e.g., 2′-O, 4′-C-methylene-(D-ribofuranosyl) nucleotides); 2′-methoxyethoxy (MOE) nucleotides; 2′-methyl-thio-ethyl, 2′-deoxy-2′-fluoro nucleotides, 2′-deoxy-2′-chloro nucleotides, 2′-azido nucleotides, 2′-O-trifluoromethyl nucleotides, 2′-O-ethyl-trifluoromethoxy nucleotides, 2′-O-difluoromethoxy-ethoxy nucleotides, 4′-thio nucleotides and 2′-O-methyl nucleotides.

[0149] In one embodiment, the sense strand of a double stranded siNA molecule of the invention comprises a terminal cap moiety, (see for example FIG. 10) such as an inverted deoxyabaisc moiety, at the 3′-end, 5′-end, or both 3′ and 5′-ends of the sense strand.

[0150] In one embodiment, the invention features a chemically-modified short interfering nucleic acid molecule (siNA) capable of mediating RNA interference (RNAi) inside a cell or reconstituted in vitro system, wherein the chemical modification comprises a conjugate covalently attached to the chemically-modified siNA molecule. Non-limiting examples of conjugates contemplated by the invention include conjugates and ligands described in Vargeese et al., U.S. Ser. No. 10/427,160, filed Apr. 30, 2003, incorporated by reference herein in its entirety, including the drawings. In another embodiment, the conjugate is covalently attached to the chemically-modified siNA molecule via a biodegradable linker. In one embodiment, the conjugate molecule is attached at the 3′-end of either the sense strand, the antisense strand, or both strands of the chemically-modified siNA molecule. In another embodiment, the conjugate molecule is attached at the 5′-end of either the sense strand, the antisense strand, or both strands of the chemically-modified siNA molecule. In yet another embodiment, the conjugate molecule is attached both the 3′-end and 5′-end of either the sense strand, the antisense strand, or both strands of the chemically-modified siNA molecule, or any combination thereof. In one embodiment, a conjugate molecule of the invention comprises a molecule that facilitates delivery of a chemically-modified siNA molecule into a biological system, such as a cell. In another embodiment, the conjugate molecule attached to the chemically-modified siNA molecule is a ligand for a cellular receptor, such as peptides derived from naturally occurring protein ligands; protein localization sequences, including cellular ZIP code sequences; antibodies; nucleic acid aptamers; vitamins and other co-factors, such as folate and N-acetylgalactosamine; polymers, such as polyethyleneglycol (PEG); phospholipids; cholesterol; steroids, and polyamines, such as PEI, spermine or spermidine. Examples of specific conjugate molecules contemplated by the instant invention that can be attached to chemically-modified siNA molecules are described in Vargeese et al., U.S. Ser. No. 10/201,394, filed Jul. 22, 2002 incorporated by reference herein. The type of conjugates used and the extent of conjugation of siNA molecules of the invention can be evaluated for improved pharmacokinetic profiles, bioavailability, and/or stability of siNA constructs while at the same time maintaining the ability of the siNA to mediate RNAi activity. As such, one skilled in the art can screen siNA constructs that are modified with various conjugates to determine whether the siNA conjugate complex possesses improved properties while maintaining the ability to mediate RNAi, for example in animal models as are generally known in the art.

[0151] In one embodiment, the invention features a short interfering nucleic acid (siNA) molecule of the invention, wherein the siNA further comprises a nucleotide, non-nucleotide, or mixed nucleotide/non-nucleotide linker that joins the sense region of the siNA to the antisense region of the siNA. In one embodiment, a nucleotide, non-nucleotide, or mixed nucleotide/non-nucleotide linker is used, for example, to attach a conjugate moiety to the siNA. In one embodiment, a nucleotide linker of the invention can be a linker of >2 nucleotides in length, for example about 3, 4, 5, 6, 7, 8, 9, or 10 nucleotides in length. In another embodiment, the nucleotide linker can be a nucleic acid aptamer. By “aptamer” or “nucleic acid aptamer” as used herein is meant a nucleic acid molecule that binds specifically to a SREBP1 target molecule wherein the nucleic acid molecule has sequence that comprises a sequence recognized by the SREBP1 target molecule in its natural setting. Alternately, an aptamer can be a nucleic acid molecule that binds to a SREBP1 target molecule where the SREBP1 target molecule does not naturally bind to a nucleic acid. The SREBP1 target molecule can be any molecule of interest. For example, the aptamer can be used to bind to a ligand-binding domain of a protein, thereby preventing interaction of the naturally occurring ligand with the protein. This is a non-limiting example and those in the art will recognize that other embodiments can be readily generated using techniques generally known in the art. (See, for example, Gold et al., 1995, Annu. Rev. Biochem., 64, 763; Brody and Gold, 2000, J. Biotechnol., 74, 5; Sun, 2000, Curr. Opin. Mol. Ther., 2, 100; Kusser, 2000, J. Biotechnol., 74, 27; Hermann and Patel, 2000, Science, 287, 820; and Jayasena, 1999, Clinical Chemistry, 45, 1628.)

[0152] In yet another embodiment, a non-nucleotide linker of the invention comprises abasic nucleotide, polyether, polyamine, polyamide, peptide, carbohydrate, lipid, polyhydrocarbon, or other polymeric compounds (e.g. polyethylene glycols such as those having between 2 and 100 ethylene glycol units). Specific examples include those described by Seela and Kaiser, Nucleic Acids Res. 1990, 18:6353 and Nucleic Acids Res. 1987, 15:3113; Cload and Schepartz, J. Am. Chem. Soc. 1991, 113:6324; Richardson and Schepartz, J. Am. Chem. Soc. 1991, 113:5109; Ma et al., Nucleic Acids Res. 1993, 21:2585 and Biochemistry 1993, 32:1751; Durand et al., Nucleic Acids Res. 1990, 18:6353; McCurdy et al., Nucleosides & Nucleotides 1991, 10:287; Jschke et al., Tetrahedron Lett. 1993, 34:301; Ono et al., Biochemistry 1991, 30:9914; Arnold et al., International Publication No. WO 89/02439; Usman et al., International Publication No. WO 95/06731; Dudycz et al., International Publication No. WO 95/11910 and Ferentz and Verdine, J. Am. Chem. Soc. 1991, 113:4000, all hereby incorporated by reference herein. A “non-nucleotide” further means any group or compound that can be incorporated into a nucleic acid chain in the place of one or more nucleotide units, including either sugar and/or phosphate substitutions, and allows the remaining bases to exhibit their enzymatic activity. The group or compound can be abasic in that it does not contain a commonly recognized nucleotide base, such as adenosine, guanine, cytosine, uracil or thymine, for example at the C1 position of the sugar.

[0153] In one embodiment, the invention features a short interfering nucleic acid (siNA) molecule capable of mediating RNA interference (RNAi) inside a cell or reconstituted in vitro system, wherein one or both strands of the siNA molecule that are assembled from two separate oligonucleotides do not comprise any ribonucleotides. For example, a siNA molecule can be assembled from a single oligonucleotide where the sense and antisense regions of the siNA comprise separate oligonucleotides that do not have any ribonucleotides (e.g., nucleotides having a 2′-OH group) present in the oligonucleotides. In another example, a siNA molecule can be assembled from a single oligonucleotide where the sense and antisense regions of the siNA are linked or circularized by a nucleotide or non-nucleotide linker as described herein, wherein the oligonucleotide does not have any ribonucleotides (e.g., nucleotides having a 2′-OH group) present in the oligonucleotide. Applicant has surprisingly found that the presence of ribonucleotides (e.g., nucleotides having a 2′-hydroxyl group) within the siNA molecule is not required or essential to support RNAi activity. As such, in one embodiment, all positions within the siNA can include chemically modified nucleotides and/or non-nucleotides such as nucleotides and or non-nucleotides having Formula I, II, III, IV, V, VI, or VII or any combination thereof to the extent that the ability of the siNA molecule to support RNAi activity in a cell is maintained.

[0154] In one embodiment, a siNA molecule of the invention is a single stranded siNA molecule that mediates RNAi activity in a cell or reconstituted in vitro system comprising a single stranded polynucleotide having complementarity to a SREBP1 target nucleic acid sequence. In another embodiment, the single stranded siNA molecule of the invention comprises a 5′-terminal phosphate group. In another embodiment, the single stranded siNA molecule of the invention comprises a 5′-terminal phosphate group and a 3′-terminal phosphate group (e.g., a 2′,3′-cyclic phosphate). In another embodiment, the single stranded siNA molecule of the invention comprises about 15 to about 30 (e.g., about 15, 16, 17, 18, 19, 20, 21, 22, 23, 24, 25, 26, 27, 28, 29, or 30) nucleotides. In yet another embodiment, the single stranded siNA molecule of the invention comprises one or more chemically modified nucleotides or non-nucleotides described herein. For example, all the positions within the siNA molecule can include chemically-modified nucleotides such as nucleotides having any of Formulae I-VII, or any combination thereof to the extent that the ability of the siNA molecule to support RNAi activity in a cell is maintained.

[0155] In one embodiment, a siNA molecule of the invention is a single stranded siNA molecule that mediates RNAi activity or that alternately modulates RNAi activity in a cell or reconstituted in vitro system comprising a single stranded polynucleotide having complementarity to a SREBP1 target nucleic acid sequence, wherein one or more pyrimidine nucleotides present in the siNA are 2′-deoxy-2′-fluoro, 4′-thio, 2′-O-trifluoromethyl, 2′-O-ethyl-trifluoromethoxy, or 2′-O-difluoromethoxy-ethoxy pyrimidine nucleotides (e.g., wherein all pyrimidine nucleotides are 2′-deoxy-2′-fluoro, 4′-thio, 2′-O-trifluoromethyl, 2′-O-ethyl-trifluoromethoxy, or 2′-O-difluoromethoxy-ethoxy pyrimidine nucleotides or alternately a plurality of pyrimidine nucleotides are 2′-deoxy-2′-fluoro, 4′-thio, 2′-O-trifluoromethyl, 2′-O-ethyl-trifluoromethoxy, or 2′-O-difluoromethoxy-ethoxy pyrimidine nucleotides), and wherein any purine nucleotides present in the antisense region are 2′-O-methyl, 4′-thio, 2′-O-trifluoromethyl, 2′-O-ethyl-trifluoromethoxy, or 2′-O-difluoromethoxy-ethoxy purine nucleotides (e.g., wherein all purine nucleotides are 2′-O-methyl, 4′-thio, 2′-O-trifluoromethyl, 2′-O-ethyl-trifluoromethoxy, or 2′-O-difluoromethoxy-ethoxy purine nucleotides or alternately a plurality of purine nucleotides are 2′-O-methyl, 4′-thio, 2′-O-trifluoromethyl, 2′-O-ethyl-trifluoromethoxy, or 2′-O-difluoromethoxy-ethoxy purine nucleotides), and a terminal cap modification, such as any modification described herein or shown in FIG. 10, that is optionally present at the 3′-end, the 5′-end, or both of the 3′ and 5′-ends of the antisense sequence. The siNA optionally further comprises about 1 to about 4 or more (e.g., about 1, 2, 3, 4 or more) terminal 2′-deoxynucleotides at the 3′-end of the siNA molecule, wherein the terminal nucleotides can further comprise one or more (e.g., 1, 2, 3, 4 or more) phosphorothioate, phosphonoacetate, and/or thiophosphonoacetate internucleotide linkages, and wherein the siNA optionally further comprises a terminal phosphate group, such as a 5′-terminal phosphate group. In any of these embodiments, any purine nucleotides present in the antisense region are alternatively 2′-deoxy purine nucleotides (e.g., wherein all purine nucleotides are 2′-deoxy purine nucleotides or alternately a plurality of purine nucleotides are 2′-deoxy purine nucleotides). Also, in any of these embodiments, any purine nucleotides present in the siNA (i.e., purine nucleotides present in the sense and/or antisense region) can alternatively be locked nucleic acid (LNA) nucleotides (e.g., wherein all purine nucleotides are LNA nucleotides or alternately a plurality of purine nucleotides are LNA nucleotides). Also, in any of these embodiments, any purine nucleotides present in the siNA are alternatively 2′-methoxyethyl purine nucleotides (e.g., wherein all purine nucleotides are 2′-methoxyethyl purine nucleotides or alternately a plurality of purine nucleotides are 2′-methoxyethyl purine nucleotides). In another embodiment, any modified nucleotides present in the single stranded siNA molecules of the invention comprise modified nucleotides having properties or characteristics similar to naturally occurring ribonucleotides. For example, the invention features siNA molecules including modified nucleotides having a Northern conformation (e.g., Northern pseudorotation cycle, see for example Saenger, Principles of Nucleic Acid Structure, Springer-Verlag ed., 1984). As such, chemically modified nucleotides present in the single stranded siNA molecules of the invention are preferably resistant to nuclease degradation while at the same time maintaining the capacity to mediate RNAi.

[0156] In one embodiment, a chemically-modified short interfering nucleic acid (siNA) molecule of the invention comprises a sense strand or sense region having two or more (e.g., 2, 3, 4, 5, 6, 7, 8, 9, 10, 11, 12, 13, 14 15, 16, 17, 18, 19, 20, 21, 22, 23, 24, 25, 26, 27, 28, 29, 30 or more) 2′-O-alkyl (e.g. 2′-O-methyl) modifications or any combination thereof. In another embodiment, the 2′-O-alkyl modification is at alternating position in the sense strand or sense region of the siNA, such as position 1, 3, 5, 7, 9, 11, 13, 15, 17, 19, 21 etc. or position 2, 4, 6, 8, 10, 12, 14, 16, 18, 20 etc.

[0157] In one embodiment, a chemically-modified short interfering nucleic acid (siNA) molecule of the invention comprises an antisense strand or antisense region having two or more (e.g., 2, 3, 4, 5, 6, 7, 8, 9, 10, 11, 12, 13, 14 15, 16, 17, 18, 19, 20, 21, 22, 23, 24, 25, 26, 27, 28, 29, 30 or more) 2′-O-alkyl (e.g. 2′-O-methyl) modifications or any combination thereof. In another embodiment, the 2′-O-alkyl modification is at alternating position in the antisense strand or antisense region of the siNA, such as position 1, 3, 5, 7, 9, 11, 13, 15, 17, 19, 21 etc. or position 2, 4, 6, 8, 10, 12, 14, 16, 18, 20 etc.

[0158] In one embodiment, a chemically-modified short interfering nucleic acid (siNA) molecule of the invention comprises a sense strand or sense region and an antisense strand or antisense region, each having two or more (e.g., 2, 3, 4, 5, 6, 7, 8, 9, 10, 11, 12, 13, 14 15, 16, 17, 18, 19, 20, 21, 22, 23, 24, 25, 26, 27, 28, 29, 30 or more) 2′-O-alkyl (e.g. 2′-O-methyl), 2′-deoxy-2′-fluoro, 2′-deoxy, or abasic chemical modifications or any combination thereof. In another embodiment, the 2′-O-alkyl modification is at alternating position in the sense strand or sense region of the siNA, such as position 1, 3, 5, 7, 9, 11, 13, 15, 17, 19, 21 etc. or position 2, 4, 6, 8, 10, 12, 14, 16, 18, 20 etc. In another embodiment, the 2′-O-alkyl modification is at alternating position in the antisense strand or antisense region of the siNA, such as position 1, 3, 5, 7, 9, 11, 13, 15, 17, 19, 21 etc. or position 2, 4, 6, 8, 10, 12, 14, 16, 18, 20 etc.

[0159] In one embodiment, a siNA molecule of the invention comprises chemically modified nucleotides or non-nucleotides (e.g., having any of Formulae I-VII, such as 2′-deoxy, 2′-deoxy-2′-fluoro, 4′-thio, 2′-O-trifluoromethyl, 2′-O-ethyl-trifluoromethoxy, 2′-O-difluoromethoxy-ethoxy or 2′-O-methyl nucleotides) at alternating positions within one or more strands or regions of the siNA molecule. For example, such chemical modifications can be introduced at every other position of a RNA based siNA molecule, starting at either the first or second nucleotide from the 3′-end or 5′-end of the siNA. In a non-limiting example, a double stranded siNA molecule of the invention in which each strand of the siNA is 21 nucleotides in length is featured wherein positions 1, 3, 5, 7, 9, 11, 13, 15, 17, 19 and 21 of each strand are chemically modified (e.g., with compounds having any of Formulae I-VII, such as such as 2′-deoxy, 2′-deoxy-2′-fluoro, 4′-thio, 2′-O-trifluoromethyl, 2′-O-ethyl-trifluoromethoxy, 2′-O-difluoromethoxy-ethoxy or 2′-O-methyl nucleotides). In another non-limiting example, a double stranded siNA molecule of the invention in which each strand of the siNA is 21 nucleotides in length is featured wherein positions 2, 4, 6, 8, 10, 12, 14, 16, 18, and 20 of each strand are chemically modified (e.g., with compounds having any of Formulae I-VII, such as such as 2′-deoxy, 2′-deoxy-2′-fluoro, 4′-thio, 2′-O-trifluoromethyl, 2′-O-ethyl-trifluoromethoxy, 2′-O-difluoromethoxy-ethoxy or 2′-O-methyl nucleotides). In one embodiment, one strand of the double stranded siNA molecule comprises chemical modifications at positions 2, 4, 6, 8, 10, 12, 14, 16, 18, and 20 and chemical modifications at positions 1, 3, 5, 7, 9, 11, 13, 15, 17, 19 and 21. Such siNA molecules can further comprise terminal cap moieties and/or backbone modifications as described herein.

[0160] In one embodiment, a siNA molecule of the invention comprises the following features: if purine nucleotides are present at the 5′-end (e.g., at any of terminal nucleotide positions 1, 2, 3, 4, 5, or 6 from the 5′-end) of the antisense strand or antisense region (otherwise referred to as the guide sequence or guide strand) of the siNA molecule then such purine nucleosides are ribonucleotides. In another embodiment, the purine ribonucleotides, when present, are base paired to nucleotides of the sense strand or sense region (otherwise referred to as the passenger strand) of the siNA molecule. Such purine ribonucleotides can be present in a siNA stabilization motif that otherwise comprises modified nucleotides.

[0161] In one embodiment, a siNA molecule of the invention comprises the following features: if pyrimidine nucleotides are present at the 5′-end (e.g., at any of terminal nucleotide positions 1, 2, 3, 4, 5, or 6 from the 5′-end) of the antisense strand or antisense region (otherwise referred to as the guide sequence or guide strand) of the siNA molecule then such pyrimidine nucleosides are ribonucleotides. In another embodiment, the pyrimidine ribonucleotides, when present, are base paired to nucleotides of the sense strand or sense region (otherwise referred to as the passenger strand) of the siNA molecule. Such pyrimidine ribonucleotides can be present in a siNA stabilization motif that otherwise comprises modified nucleotides.

[0162] In one embodiment, a siNA molecule of the invention comprises the following features: if pyrimidine nucleotides are present at the 5′-end (e.g., at any of terminal nucleotide positions 1, 2, 3, 4, 5, or 6 from the 5′-end) of the antisense strand or antisense region (otherwise referred to as the guide sequence or guide strand) of the siNA molecule then such pyrimidine nucleosides are modified nucleotides. In another embodiment, the modified pyrimidine nucleotides, when present, are base paired to nucleotides of the sense strand or sense region (otherwise referred to as the passenger strand) of the siNA molecule. Non-limiting examples of modified pyrimidine nucleotides include those having any of Formulae I-VII, such as such as 2′-deoxy, 2′-deoxy-2′-fluoro, 4′-thio, 2′-O-trifluoromethyl, 2′-O-ethyl-trifluoromethoxy, 2′-O-difluoromethoxy-ethoxy or 2′-O-methyl nucleotides.

[0163] In one embodiment, the invention features a double stranded nucleic acid molecule having structure SI:

[chemical structure]

[0164] wherein each N is independently a nucleotide; each B is a terminal cap moiety that can be present or absent; (N) represents non-base paired or overhanging nucleotides which can be unmodified or chemically modified; [N] represents nucleotide positions wherein any purine nucleotides when present are ribonucleotides; X1 and X2 are independently integers from about 0 to about 4; X3 is an integer from about 9 to about 30; X4 is an integer from about 11 to about 30, provided that the sum of X4 and X5 is between 17-36; X5 is an integer from about 1 to about 6; NX3 is complementary to NX4 and NX5, and
[0165] (a) any pyrimidine nucleotides present in the antisense strand (lower strand) are 2′-deoxy-2′-fluoro nucleotides; any purine nucleotides present in the antisense strand (lower strand) other than the purines nucleotides in the [N] nucleotide positions, are independently 2′-O-methyl nucleotides, 2′-deoxyribonucleotides or a combination of 2′-deoxyribonucleotides and 2′-O-methyl nucleotides;
[0166] (b) any pyrimidine nucleotides present in the sense strand (upper strand) are 2′-deoxy-2′-fluoro nucleotides; any purine nucleotides present in the sense strand (upper strand) are independently 2′-deoxyribonucleotides, 2′-O-methyl nucleotides or a combination of 2′-deoxyribonucleotides and 2′-O-methyl nucleotides; and
[0167] (c) any (N) nucleotides are optionally 2′-O-methyl, 2′-deoxy-2′-fluoro, or deoxyribonucleotides.

[0168] In one embodiment, the invention features a double stranded nucleic acid molecule having structure SII:

[chemical structure]

[0169] wherein each N is independently a nucleotide; each B is a terminal cap moiety that can be present or absent; (N) represents non-base paired or overhanging nucleotides which can be unmodified or chemically modified; [N] represents nucleotide positions wherein any purine nucleotides when present are ribonucleotides; X1 and X2 are independently integers from about 0 to about 4; X3 is an integer from about 9 to about 30; X4 is an integer from about 11 to about 30, provided that the sum of X4 and X5 is between 17-36; X5 is an integer from about 1 to about 6; NX3 is complementary to NX4 and NX5, and
[0170] (a) any pyrimidine nucleotides present in the antisense strand (lower strand) are 2′-deoxy-2′-fluoro nucleotides; any purine nucleotides present in the antisense strand (lower strand) other than the purines nucleotides in the [N] nucleotide positions, are 2′-O-methyl nucleotides;
[0171] (b) any pyrimidine nucleotides present in the sense strand (upper strand) are ribonucleotides; any purine nucleotides present in the sense strand (upper strand) are ribonucleotides; and
[0172] (c) any (N) nucleotides are optionally 2′-O-methyl, 2′-deoxy-2′-fluoro, or deoxyribonucleotides.

[0173] In one embodiment, the invention features a double stranded nucleic acid molecule having structure SIII:

[chemical structure]

[0174] wherein each N is independently a nucleotide; each B is a terminal cap moiety that can be present or absent; (N) represents non-base paired or overhanging nucleotides which can be unmodified or chemically modified; [N] represents nucleotide positions wherein any purine nucleotides when present are ribonucleotides; X1 and X2 are independently integers from about 0 to about 4; X3 is an integer from about 9 to about 30; X4 is an integer from about 11 to about 30, provided that the sum of X4 and X5 is between 17-36; X5 is an integer from about 1 to about 6; NX3 is complementary to NX4 and NX5, and
[0175] (a) any pyrimidine nucleotides present in the antisense strand (lower strand) are 2′-deoxy-2′-fluoro nucleotides; any purine nucleotides present in the antisense strand (lower strand) other than the purines nucleotides in the [N] nucleotide positions, are 2′-O-methyl nucleotides;
[0176] (b) any pyrimidine nucleotides present in the sense strand (upper strand) are 2′-deoxy-2′-fluoro nucleotides; any purine nucleotides present in the sense strand (upper strand) are ribonucleotides; and
[0177] (c) any (N) nucleotides are optionally 2′-O-methyl, 2′-deoxy-2′-fluoro, or deoxyribonucleotides.

[0178] In one embodiment, the invention features a double stranded nucleic acid molecule having structure SIV:

[chemical structure]

[0179] wherein each N is independently a nucleotide; each B is a terminal cap moiety that can be present or absent; (N) represents non-base paired or overhanging nucleotides which can be unmodified or chemically modified; [N] represents nucleotide positions wherein any purine nucleotides when present are ribonucleotides; X1 and X2 are independently integers from about 0 to about 4; X3 is an integer from about 9 to about 30; X4 is an integer from about 11 to about 30, provided that the sum of X4 and X5 is between 17-36; X5 is an integer from about 1 to about 6; NX3 is complementary to NX4 and NX5, and
[0180] (a) any pyrimidine nucleotides present in the antisense strand (lower strand) are 2′-deoxy-2′-fluoro nucleotides; any purine nucleotides present in the antisense strand (lower strand) other than the purines nucleotides in the [N] nucleotide positions, are 2′-O-methyl nucleotides;
[0181] (b) any pyrimidine nucleotides present in the sense strand (upper strand) are 2′-deoxy-2′-fluoro nucleotides; any purine nucleotides present in the sense strand (upper strand) are deoxyribonucleotides; and
[0182] (c) any (N) nucleotides are optionally 2′-O-methyl, 2′-deoxy-2′-fluoro, or deoxyribonucleotides.

[0183] In one embodiment, the invention features a double stranded nucleic acid molecule having structure SV:

[chemical structure]

[0184] wherein each N is independently a nucleotide; each B is a terminal cap moiety that can be present or absent; (N) represents non-base paired or overhanging nucleotides which can be unmodified or chemically modified; [N] represents nucleotide positions wherein any purine nucleotides when present are ribonucleotides; X1 and X2 are independently integers from about 0 to about 4; X3 is an integer from about 9 to about 30; X4 is an integer from about 11 to about 30, provided that the sum of X4 and X5 is between 17-36; X5 is an integer from about 1 to about 6; NX3 is complementary to NX4 and NX5, and
[0185] (a) any pyrimidine nucleotides present in the antisense strand (lower strand) are nucleotides having a ribo-like configuration (e.g., Northern or A-form helix configuration); any purine nucleotides present in the antisense strand (lower strand) other than the purines nucleotides in the [N] nucleotide positions, are 2′-O-methyl nucleotides;
[0186] (b) any pyrimidine nucleotides present in the sense strand (upper strand) are nucleotides having a ribo-like configuration (e.g., Northern or A-form helix configuration); any purine nucleotides present in the sense strand (upper strand) are 2′-O-methyl nucleotides; and
[0187] (c) any (N) nucleotides are optionally 2′-O-methyl, 2′-deoxy-2′-fluoro, or deoxyribonucleotides.

[0188] In one embodiment, the invention features a double stranded nucleic acid molecule having structure SVI:

[chemical structure]

[0189] wherein each N is independently a nucleotide; each B is a terminal cap moiety that can be present or absent; (N) represents non-base paired or overhanging nucleotides which can be unmodified or chemically modified; [N] represents nucleotide positions comprising sequence that renders the 5′-end of the antisense strand (lower strand) less thermally stable than the 5′-end of the sense strand (upper strand); X1 and X2 are independently integers from about 0 to about 4; X3 is an integer from about 9 to about 30; X4 is an integer from about 11 to about 30, provided that the sum of X4 and X5 is between 17-36; X5 is an integer from about 1 to about 6; NX3 is complementary to NX4 and NX5, and
[0190] (a) any pyrimidine nucleotides present in the antisense strand (lower strand) are 2′-deoxy-2′-fluoro nucleotides; any purine nucleotides present in the antisense strand (lower strand) other than the purines nucleotides in the [N] nucleotide positions, are independently 2′-O-methyl nucleotides, 2′-deoxyribonucleotides or a combination of 2′-deoxyribonucleotides and 2′-O-methyl nucleotides;
[0191] (b) any pyrimidine nucleotides present in the sense strand (upper strand) are 2′-deoxy-2′-fluoro nucleotides; any purine nucleotides present in the sense strand (upper strand) are independently 2′-deoxyribonucleotides, 2′-O-methyl nucleotides or a combination of 2′-deoxyribonucleotides and 2′-O-methyl nucleotides; and
[0192] (c) any (N) nucleotides are optionally 2′-O-methyl, 2′-deoxy-2′-fluoro, or deoxyribonucleotides.

[0193] In one embodiment, the invention features a double stranded nucleic acid molecule having structure SVII:

[chemical structure]

[0194] wherein each N is independently a nucleotide; each B is a terminal cap moiety that can be present or absent; (N) represents non-base paired or overhanging nucleotides; X1 and X2 are independently integers from about 0 to about 4; X3 is an integer from about 9 to about 30; X4 is an integer from about 11 to about 30; NX3 is complementary to NX4, and any (N) nucleotides are 2′-O-methyl and/or 2′-deoxy-2′-fluoro nucleotides.

[0195] In one embodiment, the invention features a double stranded nucleic acid molecule having structure SVIII:

[chemical structure]

[0196] wherein each N is independently a nucleotide; each B is a terminal cap moiety that can be present or absent; (N) represents non-base paired or overhanging nucleotides which can be unmodified or chemically modified; [N] represents nucleotide positions comprising sequence that renders the 5′-end of the antisense strand (lower strand) less thermally stable than the 5′-end of the sense strand (upper strand); [N] represents nucleotide positions that are ribonucleotides; X1 and X2 are independently integers from about 0 to about 4; X3 is an integer from about 9 to about 15; X4 is an integer from about 11 to about 30, provided that the sum of X4 and X5 is between 17-36; X5 is an integer from about 1 to about 6; X6 is an integer from about 1 to about 4; X7 is an integer from about 9 to about 15; NX7, NX6, and NX3 are complementary to NX4 and NX5, and
[0197] (a) any pyrimidine nucleotides present in the antisense strand (lower strand) are 2′-deoxy-2′-fluoro nucleotides; any purine nucleotides present in the antisense strand (lower strand) other than the purines nucleotides in the [N] nucleotide positions, are independently 2′-O-methyl nucleotides, 2′-deoxyribonucleotides or a combination of 2′-deoxyribonucleotides and 2′-O-methyl nucleotides;
[0198] (b) any pyrimidine nucleotides present in the sense strand (upper strand) are 2′-deoxy-2′-fluoro nucleotides other than [N] nucleotides; any purine nucleotides present in the sense strand (upper strand) are independently 2′-deoxyribonucleotides, 2′-O-methyl nucleotides or a combination of 2′-deoxyribonucleotides and 2′-O-methyl nucleotides other than [N] nucleotides; and
[0199] (c) any (N) nucleotides are optionally 2′-O-methyl, 2′-deoxy-2′-fluoro, or deoxyribonucleotides.

[0200] In one embodiment, the invention features a double stranded nucleic acid molecule having structure SIX:

[chemical structure]

[0201] wherein each N is independently a nucleotide; each B is a terminal cap moiety that can be present or absent; (N) represents non-base paired or overhanging nucleotides which can be unmodified or chemically modified; [N] represents nucleotide positions that are ribonucleotides; X1 and X2 are independently integers from about 0 to about 4; X3 is an integer from about 9 to about 30; X4 is an integer from about 11 to about 30, provided that the sum of X4 and X5 is between 17-36; X5 is an integer from about 1 to about 6; NX3 is complementary to NX4 and NX5, and
[0202] (a) any pyrimidine nucleotides present in the antisense strand (lower strand) are 2′-deoxy-2′-fluoro nucleotides; any purine nucleotides present in the antisense strand (lower strand) other than the purines nucleotides in the [N] nucleotide positions, are independently 2′-O-methyl nucleotides, 2′-deoxyribonucleotides or a combination of 2′-deoxyribonucleotides and 2′-O-methyl nucleotides;
[0203] (b) any pyrimidine nucleotides present in the sense strand (upper strand) are 2′-deoxy-2′-fluoro nucleotides; any purine nucleotides present in the sense strand (upper strand) are independently 2′-deoxyribonucleotides, 2′-O-methyl nucleotides or a combination of 2′-deoxyribonucleotides and 2′-O-methyl nucleotides; and
[0204] (c) any (N) nucleotides are optionally 2′-O-methyl, 2′-deoxy-2′-fluoro, or deoxyribonucleotides.

[0205] In one embodiment, the invention features a double stranded nucleic acid molecule having structure SX:

[chemical structure]

[0206] wherein each N is independently a nucleotide; each B is a terminal cap moiety that can be present or absent; (N) represents non-base paired or overhanging nucleotides which can be unmodified or chemically modified; [N] represents nucleotide positions that are ribonucleotides; X1 and X2 are independently integers from about 0 to about 4; X3 is an integer from about 9 to about 30; X4 is an integer from about 11 to about 30, provided that the sum of X4 and X5 is between 17-36; X5 is an integer from about 1 to about 6; NX3 is complementary to NX4 and NX5, and
[0207] (a) any pyrimidine nucleotides present in the antisense strand (lower strand) are 2′-deoxy-2′-fluoro nucleotides; any purine nucleotides present in the antisense strand (lower strand) other than the purines nucleotides in the [N] nucleotide positions, are 2′-O-methyl nucleotides;
[0208] (b) any pyrimidine nucleotides present in the sense strand (upper strand) are ribonucleotides; any purine nucleotides present in the sense strand (upper strand) are ribonucleotides; and
[0209] (c) any (N) nucleotides are optionally 2′-O-methyl, 2′-deoxy-2′-fluoro, or deoxyribonucleotides.

[0210] In one embodiment, the invention features a double stranded nucleic acid molecule having structure SXI:

[chemical structure]

[0211] wherein each N is independently a nucleotide; each B is a terminal cap moiety that can be present or absent; (N) represents non-base paired or overhanging nucleotides which can be unmodified or chemically modified; [N] represents nucleotide positions that are ribonucleotides; X1 and X2 are independently integers from about 0 to about 4; X3 is an integer from about 9 to about 30; X4 is an integer from about 11 to about 30, provided that the sum of X4 and X5 is between 17-36; X5 is an integer from about 1 to about 6; NX3 is complementary to NX4 and NX5, and
[0212] (a) any pyrimidine nucleotides present in the antisense strand (lower strand) are 2′-deoxy-2′-fluoro nucleotides; any purine nucleotides present in the antisense strand (lower strand) other than the purines nucleotides in the [N] nucleotide positions, are 2′-O-methyl nucleotides;
[0213] (b) any pyrimidine nucleotides present in the sense strand (upper strand) are 2′-deoxy-2′-fluoro nucleotides; any purine nucleotides present in the sense strand (upper strand) are ribonucleotides; and
[0214] (c) any (N) nucleotides are optionally 2′-O-methyl, 2′-deoxy-2′-fluoro, or deoxyribonucleotides.

[0215] In one embodiment, the invention features a double stranded nucleic acid molecule having structure SXII:

[chemical structure]

[0216] wherein each N is independently a nucleotide; each B is a terminal cap moiety that can be present or absent; (N) represents non-base paired or overhanging nucleotides which can be unmodified or chemically modified; [N] represents nucleotide positions that are ribonucleotides; X1 and X2 are independently integers from about 0 to about 4; X3 is an integer from about 9 to about 30; X4 is an integer from about 11 to about 30, provided that the sum of X4 and X5 is between 17-36; X5 is an integer from about 1 to about 6; NX3 is complementary to NX4 and NX5, and
[0217] (a) any pyrimidine nucleotides present in the antisense strand (lower strand) are 2′-deoxy-2′-fluoro nucleotides; any purine nucleotides present in the antisense strand (lower strand) other than the purines nucleotides in the [N] nucleotide positions, are 2′-O-methyl nucleotides;
[0218] (b) any pyrimidine nucleotides present in the sense strand (upper strand) are 2′-deoxy-2′-fluoro nucleotides; any purine nucleotides present in the sense strand (upper strand) are deoxyribonucleotides; and
[0219] (c) any (N) nucleotides are optionally 2′-O-methyl, 2′-deoxy-2′-fluoro, or deoxyribonucleotides.

[0220] In one embodiment, the invention features a double stranded nucleic acid molecule having structure SXIII:

[chemical structure]

[0221] wherein each N is independently a nucleotide; each B is a terminal cap moiety that can be present or absent; (N) represents non-base paired or overhanging nucleotides which can be unmodified or chemically modified; [N] represents nucleotide positions that are ribonucleotides; X1 and X2 are independently integers from about 0 to about 4; X3 is an integer from about 9 to about 30; X4 is an integer from about 11 to about 30, provided that the sum of X4 and X5 is between 17-36; X5 is an integer from about 1 to about 6; NX3 is complementary to NX4 and NX5, and
[0222] (a) any pyrimidine nucleotides present in the antisense strand (lower strand) are nucleotides having a ribo-like configuration (e.g., Northern or A-form helix configuration); any purine nucleotides present in the antisense strand (lower strand) other than the purines nucleotides in the [N] nucleotide positions, are 2′-O-methyl nucleotides;
[0223] (b) any pyrimidine nucleotides present in the sense strand (upper strand) are nucleotides having a ribo-like configuration (e.g., Northern or A-form helix configuration); any purine nucleotides present in the sense strand (upper strand) are 2′-O-methyl nucleotides; and
[0224] (c) any (N) nucleotides are optionally 2′-O-methyl, 2′-deoxy-2′-fluoro, or deoxyribonucleotides.

[0225] In one embodiment, the invention features a double stranded nucleic acid molecule having structure SXIV:

[chemical structure]

[0226] wherein each N is independently a nucleotide; each B is a terminal cap moiety that can be present or absent; (N) represents non-base paired or overhanging nucleotides which can be unmodified or chemically modified; [N] represents nucleotide positions that are ribonucleotides; [N] represents nucleotide positions that are ribonucleotides; X1 and X2 are independently integers from about 0 to about 4; X3 is an integer from about 9 to about 15; X4 is an integer from about 11 to about 30, provided that the sum of X4 and X5 is between 17-36; X5 is an integer from about 1 to about 6; X6 is an integer from about 1 to about 4; X7 is an integer from about 9 to about 15; NX7, NX6, and NX3 are complementary to NX4 and NX5, and
[0227] (a) any pyrimidine nucleotides present in the antisense strand (lower strand) are 2′-deoxy-2′-fluoro nucleotides; any purine nucleotides present in the antisense strand (lower strand) other than the purines nucleotides in the [N] nucleotide positions, are independently 2′-O-methyl nucleotides, 2′-deoxyribonucleotides or a combination of 2′-deoxyribonucleotides and 2′-O-methyl nucleotides;
[0228] (b) any pyrimidine nucleotides present in the sense strand (upper strand) are 2′-deoxy-2′-fluoro nucleotides other than [N] nucleotides; any purine nucleotides present in the sense strand (upper strand) are independently 2′-deoxyribonucleotides, 2′-O-methyl nucleotides or a combination of 2′-deoxyribonucleotides and 2′-O-methyl nucleotides other than [N] nucleotides; and
[0229] (c) any (N) nucleotides are optionally 2′-O-methyl, 2′-deoxy-2′-fluoro, or deoxyribonucleotides.

[0230] In one embodiment, a double stranded nucleic acid molecule having any of structure SI, SII, SIII, SIV, SV, SVI, SVII, SVIII, SIX, SX, SXII, SXIII, or SXIV comprises a terminal phosphate group at the 5′-end of the antisense strand or antisense region of the nucleic acid molecule.

[0231] In one embodiment, a double stranded nucleic acid molecule having any of structure SI, SII, SIII, SIV, SV, SVI, SVII, SVIII, SIX, SX, SXII, SXIII, or SXIV comprises X5=1, 2, or 3; each X1 and X2=1 or 2; X3=12, 13, 14, 15, 16, 17, 18, 19, 20, 21, 22, 23, 24, 25, 26, 27, 28, 29, or 30, and X4=15, 16, 17, 18, 19, 20, 21, 22, 23, 24, 25, 26, 27, 28, 29, or 30.

[0232] In one embodiment, a double stranded nucleic acid molecule having any of structure SI, SII, SIII, SIV, SV, SVI, SVII, SVIII, SIX, SX, SXII, SXIII, or SXIV comprises X5=1; each X1 and X2=2; X3=19, and X4=18.

[0233] In one embodiment, a double stranded nucleic acid molecule having any of structure SI, SII, SIII, SIV, SV, SVI, SVII, SVIII, SIX, SX, SXII, SXIII, or SXIV comprises X5=2; each X1 and X2=2; X3=19, and X4=17

[0234] In one embodiment, a double stranded nucleic acid molecule having any of structure SI, SII, SIII, SIV, SV, SVI, SVII, SVIII, SIX, SX, SXII, SXIII, or SXIV comprises X5=3; each X1 and X2=2; X3=19, and X4=16.

[0235] In one embodiment, a double stranded nucleic acid molecule having any of structure SI, SII, SIII, SIV, SV, SVI, SVII, SVIII, SIX, SX, SXII, SXIII, or SXIV comprises B at the 3′ and 5′ ends of the sense strand or sense region.

[0236] In one embodiment, a double stranded nucleic acid molecule having any of structure SI, SII, SIII, SIV, SV, SVI, SVII, SVIII, SIX, SX, SXII, SXIII, or SXIV comprises B at the 3′-end of the antisense strand or antisense region.

[0237] In one embodiment, a double stranded nucleic acid molecule having any of structure SI, SII, SIII, SIV, SV, SVI, SVII, SVIII, SIX, SX, SXII, SXIII, or SXIV comprises B at the 3′ and 5′ ends of the sense strand or sense region and B at the 3′-end of the antisense strand or antisense region.

[0238] In one embodiment, a double stranded nucleic acid molecule having any of structure SI, SII, SIII, SIV, SV, SVI, SVII, SVIII, SIX, SX, SXII, SXIII, or SXIV further comprises one or more phosphorothioate internucleotide linkages at the first terminal (N) on the 3′ end of the sense strand, antisense strand, or both sense strand and antisense strands of the nucleic acid molecule. For example, a double stranded nucleic acid molecule can comprise X1 and/or X2=2 having overhanging nucleotide positions with a phosphorothioate internucleotide linkage, e.g., (NsN) where “s” indicates phosphorothioate.

[0239] In one embodiment, a double stranded nucleic acid molecule having any of structure SI, SII, SIII, SIV, SV, SVI, SVII, SVIII, SIX, SX, SXII, SXIII, or SXIV comprises (N) nucleotides that are 2′-O-methyl nucleotides.

[0240] In one embodiment, a double stranded nucleic acid molecule having any of structure SI, SII, SIII, SIV, SV, SVI, SVII, SVIII, SIX, SX, SXII, SXIII, or SXIV comprises (N) nucleotides that are 2′-O-methyl nucleotides.

[0241] In one embodiment, a double stranded nucleic acid molecule having any of structure SI, SII, SIII, SIV, SV, SVI, SVII, SVIII, SIX, SX, SXII, SXIII, or SXIV comprises (N) nucleotides in the antisense strand (lower strand) that are complementary to nucleotides in a SREBP1 target polynucleotide sequence having complementary to the N and [N] nucleotides of the antisense (lower) strand.

[0242] In one embodiment, a double stranded nucleic acid molecule having any of structure SI, SII, SIII, SIV, SV, SVI, SVII, SVIII, SIX, SX, SXII, SXIII, or SXIV comprises (N) nucleotides in the sense strand (upper strand) that comprise a contiguous nucleotide sequence of about 15 to about 30 nucleotides of a SREBP1 target polynucleotide sequence.

[0243] In one embodiment, a double stranded nucleic acid molecule having any of structure SI, SII, SIII, SIV, SV, SVI, SVII, SVIII, SIX, SX, SXII, SXIII, or SXIV comprises (N) nucleotides in the sense strand (upper strand) that comprise nucleotide sequence corresponding a SREBP1 target polynucleotide sequence having complementary to the antisense (lower) strand such that the contiguous (N) and N nucleotide sequence of the sense strand comprises nucleotide sequence of the SREBP1 target nucleic acid sequence.

[0244] In one embodiment, a double stranded nucleic acid molecule having any of structure SVIII or SXIV comprises B only at the 5′-end of the sense (upper) strand of the double stranded nucleic acid molecule.

[0245] In one embodiment, a double stranded nucleic acid molecule having any of structure SI, SII, SIII, SIV, SV, SVI, SVII, SVIII, SIX, SX, SXII, SXIII, or SXIV further comprises an unpaired terminal nucleotide at the 5′-end of the antisense (lower) strand. The unpaired nucleotide is not complementary to the sense (upper) strand. In one embodiment, the unpaired terminal nucleotide is complementary to a SREBP1 target polynucleotide sequence having complementary to the N and [N] nucleotides of the antisense (lower) strand. In another embodiment, the unpaired terminal nucleotide is not complementary to a SREBP1 target polynucleotide sequence having complementary to the N and [N] nucleotides of the antisense (lower) strand.

[0246] In one embodiment, a double stranded nucleic acid molecule having any of structure SVIII or SXIV comprises X6=1 and X3=10.

[0247] In one embodiment, a double stranded nucleic acid molecule having any of structure SVIII or SXIV comprises X6=2 and X3=9.

[0248] In one embodiment, the invention features a composition comprising a siNA molecule or double stranded nucleic acid molecule or RNAi inhibitor formulated as any of formulation LNP-051; LNP-053; LNP-054; LNP-069; LNP-073; LNP-077; LNP-080; LNP-082; LNP-083; LNP-060; LNP-061; LNP-086; LNP-097; LNP-098; LNP-099; LNP-100; LNP-101; LNP-102; LNP-103; or LNP-104 (see Table VI).

[0249] In one embodiment, the invention features a composition comprising a first double stranded nucleic and a second double stranded nucleic acid molecule each having a first strand and a second strand that are complementary to each other, wherein the second strand of the first double stranded nucleic acid molecule comprises sequence complementary to a first SREBP1 target sequence and the second strand of the second double stranded nucleic acid molecule comprises sequence complementary to a second SREBP1 target or SREBP1 pathway target sequence (e.g., PCSK9). In one embodiment, the composition further comprises a cationic lipid, a neutral lipid, and a polyethyleneglycol-conjugate. In one embodiment, the composition further comprises a cationic lipid, a neutral lipid, a polyethyleneglycol-conjugate, and a cholesterol. In one embodiment, the composition further comprises a polyethyleneglycol-conjugate, a cholesterol, and a surfactant. In one embodiment, the cationic lipid is selected from the group consisting of CLinDMA, pCLinDMA, eCLinDMA, DMOBA, and DMLBA. In one embodiment, the neutral lipid is selected from the group consisting of DSPC, DOBA, and cholesterol. In one embodiment, the polyethyleneglycol-conjugate is selected from the group consisting of a PEG-dimyristoyl glycerol and PEG-cholesterol. In one embodiment, the PEG is 2 KPEG. In one embodiment, the surfactant is selected from the group consisting of palmityl alcohol, stearyl alcohol, oleyl alcohol and linoleyl alcohol. In one embodiment, the cationic lipid is CLinDMA, the neutral lipid is DSPC, the polyethylene glycol conjugate is 2 KPEG-DMG, the cholesterol is cholesterol, and the surfactant is linoleyl alcohol. In one embodiment, the CLinDMA, the DSPC, the 2 KPEG-DMG, the cholesterol, and the linoleyl alcohol are present in molar ratio of 43:38:10:2:7 respectively.

[0250] In any of the embodiments herein, the siNA molecule of the invention modulates expression of one or more SREBP1 targets via RNA interference or the inhibition of RNA interference. In one embodiment, the RNA interference is RISC mediated cleavage of the SREBP1 target (e.g., siRNA mediated RNA interference). In one embodiment, the RNA interference is translational inhibition of the SREBP1 target (e.g., miRNA mediated RNA interference). In one embodiment, the RNA interference is transcriptional inhibition of the SREBP1 target (e.g., siRNA mediated transcriptional silencing). In one embodiment, the RNA interference takes place in the cytoplasm. In one embodiment, the RNA interference takes place in the nucleus.

[0251] In any of the embodiments herein, the siNA molecule of the invention modulates expression of one or more SREBP1 targets via inhibition of an endogenous SREBP1 RNA, such as an endogenous SREBP1 mRNA, SREBP1 siRNA, SREBP1 miRNA, or alternately though inhibition of RISC.

[0252] In one embodiment, the invention features one or more RNAi inhibitors that modulate the expression of one or more SREBP1 gene targets by miRNA inhibition, siRNA inhibition, or RISC inhibition.

[0253] In one embodiment, a RNAi inhibitor of the invention is a siNA molecule as described herein that has one or more strands that are complementary to one or more target miRNA or siRNA molecules.

[0254] In one embodiment, the RNAi inhibitor of the invention is an antisense molecule that is complementary to a target miRNA or siRNA molecule or a portion thereof. An antisense RNAi inhibitor of the invention can be of length of about 10 to about 40 nucleotides in length (e.g., 10, 11, 12, 13, 14, 15, 16, 17, 18, 19, 20, 21, 22, 23, 24, 25, 26, 27, 28, 29, 30, 31, 32, 33, 34, 35, 36, 37, 38, 39, or 40 nucleotides in length). An antisense RNAi inhibitor of the invention can comprise one or more modified nucleotides or non-nucleotides as described herein (see for example molecules having any of Formulae I-VII herein or any combination thereof). In one embodiment, an antisense RNAi inhibitor of the invention can comprise one or more or all 2′-O-methyl nucleotides. In one embodiment, an antisense RNAi inhibitor of the invention can comprise one or more or all 2′-deoxy-2′-fluoro nucleotides. In one embodiment, an antisense RNAi inhibitor of the invention can comprise one or more or all 2′-O-methoxy-ethyl (also known as 2′-methoxyethoxy or MOE) nucleotides. In one embodiment, an antisense RNAi inhibitor of the invention can comprise one or more or all phosphorothioate internucleotide linkages. In one embodiment, an antisense RNA inhibitor or the invention can comprise a terminal cap moiety at the 3′-end, the 5;′-end, or both the 5′ and 3′ ends of the antisense RNA inhibitor.

[0255] In one embodiment, a RNAi inhibitor of the invention is a nucleic acid aptamer having binding affinity for RISC, such as a regulatable aptamer (see for example An et al., 2006, RNA, 12:710-716). An aptamer RNAi inhibitor of the invention can be of length of about 10 to about 50 nucleotides in length (e.g., 10, 11, 12, 13, 14, 15, 16, 17, 18, 19, 20, 21, 22, 23, 24, 25, 26, 27, 28, 29, 30, 31, 32, 33, 34, 35, 36, 37, 38, 39, 40, 41, 42, 43, 44, 45, 46, 47, 48, 49, or 50 nucleotides in length). An aptamer RNAi inhibitor of the invention can comprise one or more modified nucleotides or non-nucleotides as described herein (see for example molecules having any of Formulae I-VII herein or any combination thereof). In one embodiment, an aptamer RNAi inhibitor of the invention can comprise one or more or all 2′-O-methyl nucleotides. In one embodiment, an aptamer RNAi inhibitor of the invention can comprise one or more or all 2′-deoxy-2′-fluoro nucleotides. In one embodiment, an aptamer RNAi inhibitor of the invention can comprise one or more or all 2′-O-methoxy-ethyl (also known as 2′-methoxyethoxy or MOE) nucleotides. In one embodiment, an aptamer RNAi inhibitor of the invention can comprise one or more or all phosphorothioate internucleotide linkages. In one embodiment, an aptamer RNA inhibitor or the invention can comprise a terminal cap moiety at the 3′-end, the 5;′-end, or both the 5′ and 3′ ends of the aptamer RNA inhibitor.

[0256] In one embodiment, the invention features a method for modulating the expression of a SREBP1 target gene within a cell comprising: (a) synthesizing a siNA molecule of the invention, which can be chemically-modified or unmodified, wherein one of the siNA strands comprises a sequence complementary to RNA of the SREBP1 target gene; and (b) introducing the siNA molecule into a cell under conditions suitable to modulate (e.g., inhibit) the expression of the SREBP1 target gene in the cell.

[0257] In one embodiment, the invention features a method for modulating the expression of a SREBP1 target gene within a cell comprising: (a) synthesizing a siNA molecule of the invention, which can be chemically-modified or unmodified, wherein one of the siNA strands comprises a sequence complementary to RNA of the SREBP1 target gene and wherein the sense strand sequence of the siNA comprises a sequence identical or substantially similar to the sequence of the SREBP1 target RNA; and (b) introducing the siNA molecule into a cell under conditions suitable to modulate (e.g., inhibit) the expression of the SREBP1 target gene in the cell.

[0258] In another embodiment, the invention features a method for modulating the expression of more than one SREBP1 target gene within a cell comprising: (a) synthesizing siNA molecules of the invention, which can be chemically-modified or unmodified, wherein one of the siNA strands comprises a sequence complementary to RNA of the SREBP1 target genes; and (b) introducing the siNA molecules into a cell under conditions suitable to modulate (e.g., inhibit) the expression of the SREBP1 target genes in the cell.

[0259] In another embodiment, the invention features a method for modulating the expression of two or more SREBP1 target genes within a cell comprising: (a) synthesizing one or more siNA molecules of the invention, which can be chemically-modified or unmodified, wherein the siNA strands comprise sequences complementary to RNA of the SREBP1 target genes and wherein the sense strand sequences of the siNAs comprise sequences identical or substantially similar to the sequences of the SREBP1 target RNAs; and (b) introducing the siNA molecules into a cell under conditions suitable to modulate (e.g., inhibit) the expression of the SREBP1 target genes in the cell.

[0260] In another embodiment, the invention features a method for modulating the expression of more than one SREBP1 target gene within a cell comprising: (a) synthesizing a siNA molecule of the invention, which can be chemically-modified or unmodified, wherein one of the siNA strands comprises a sequence complementary to RNA of the SREBP1 target gene and wherein the sense strand sequence of the siNA comprises a sequence identical or substantially similar to the sequences of the SREBP1 target RNAs; and (b) introducing the siNA molecule into a cell under conditions suitable to modulate (e.g., inhibit) the expression of the SREBP1 target genes in the cell.

[0261] In another embodiment, the invention features a method for modulating the expression of a SREBP1 target gene within a cell comprising: (a) synthesizing a siNA molecule of the invention, which can be chemically-modified or unmodified, wherein one of the siNA strands comprises a sequence complementary to RNA of the SREBP1 target gene, wherein the sense strand sequence of the siNA comprises a sequence identical or substantially similar to the sequences of the SREBP1 target RNA; and (b) introducing the siNA molecule into a cell under conditions suitable to modulate (e.g., inhibit) the expression of the SREBP1 target gene in the cell.

[0262] In one embodiment, siNA molecules of the invention are used as reagents in ex vivo applications. For example, siNA reagents are introduced into tissue or cells that are transplanted into a subject for therapeutic effect. The cells and/or tissue can be derived from an organism or subject that later receives the explant, or can be derived from another organism or subject prior to transplantation. The siNA molecules can be used to modulate the expression of one or more genes in the cells or tissue, such that the cells or tissue obtain a desired phenotype or are able to perform a function when transplanted in vivo. In one embodiment, certain SREBP1 target cells from a patient are extracted. These extracted cells are contacted with siNAs SREBP1 targeting a specific nucleotide sequence within the cells under conditions suitable for uptake of the siNAs by these cells (e.g. using delivery reagents such as cationic lipids, liposomes and the like or using techniques such as electroporation to facilitate the delivery of siNAs into cells). The cells are then reintroduced back into the same patient or other patients.

[0263] In one embodiment, the invention features a method of modulating the expression of a SREBP1 target gene in a tissue explant comprising: (a) synthesizing a siNA molecule of the invention, which can be chemically-modified, wherein one of the siNA strands comprises a sequence complementary to RNA of the SREBP1 target gene; and (b) introducing the siNA molecule into a cell of the tissue explant derived from a particular organism under conditions suitable to modulate (e.g., inhibit) the expression of the SREBP1 target gene in the tissue explant. In another embodiment, the method further comprises introducing the tissue explant back into the organism the tissue was derived from or into another organism under conditions suitable to modulate (e.g., inhibit) the expression of the SREBP1 target gene in that organism.

[0264] In one embodiment, the invention features a method of modulating the expression of a SREBP1 target gene in a tissue explant comprising: (a) synthesizing a siNA molecule of the invention, which can be chemically-modified, wherein one of the siNA strands comprises a sequence complementary to RNA of the SREBP1 target gene and wherein the sense strand sequence of the siNA comprises a sequence identical or substantially similar to the sequence of the SREBP1 target RNA; and (b) introducing the siNA molecule into a cell of the tissue explant derived from a particular organism under conditions suitable to modulate (e.g., inhibit) the expression of the SREBP1 target gene in the tissue explant. In another embodiment, the method further comprises introducing the tissue explant back into the organism the tissue was derived from or into another organism under conditions suitable to modulate (e.g., inhibit) the expression of the SREBP1 target gene in that organism.

[0265] In another embodiment, the invention features a method of modulating the expression of more than one SREBP1 target gene in a tissue explant comprising: (a) synthesizing siNA molecules of the invention, which can be chemically-modified, wherein one of the siNA strands comprises a sequence complementary to RNA of the SREBP1 target genes; and (b) introducing the siNA molecules into a cell of the tissue explant derived from a particular organism under conditions suitable to modulate (e.g., inhibit) the expression of the SREBP1 target genes in the tissue explant. In another embodiment, the method further comprises introducing the tissue explant back into the organism the tissue was derived from or into another organism under conditions suitable to modulate (e.g., inhibit) the expression of the SREBP1 target genes in that organism.

[0266] In one embodiment, the invention features a method of modulating the expression of a SREBP1 target gene in a subject or organism comprising: (a) synthesizing a siNA molecule of the invention, which can be chemically-modified, wherein one of the siNA strands comprises a sequence complementary to RNA of the SREBP1 target gene; and (b) introducing the siNA molecule into the subject or organism under conditions suitable to modulate (e.g., inhibit) the expression of the SREBP1 target gene in the subject or organism. The level of SREBP1 target protein or RNA can be determined using various methods well-known in the art.

[0267] In another embodiment, the invention features a method of modulating the expression of more than one SREBP1 target gene in a subject or organism comprising: (a) synthesizing siNA molecules of the invention, which can be chemically-modified, wherein one of the siNA strands comprises a sequence complementary to RNA of the SREBP1 target genes; and (b) introducing the siNA molecules into the subject or organism under conditions suitable to modulate (e.g., inhibit) the expression of the SREBP1 target genes in the subject or organism. The level of SREBP1 target protein or RNA can be determined as is known in the art.

[0268] In one embodiment, the invention features a method for modulating the expression of a SREBP1 target gene within a cell (e.g., a liver or adipose tissue cell) comprising: (a) synthesizing a siNA molecule of the invention, which can be chemically-modified, wherein the siNA comprises a single stranded sequence having complementarity to RNA of the SREBP1 target gene; and (b) introducing the siNA molecule into a cell under conditions suitable to modulate (e.g., inhibit) the expression of the SREBP1 target gene in the cell.

[0269] In another embodiment, the invention features a method for modulating the expression of more than one SREBP1 target gene within a cell (e.g., a liver or adipose tissue cell) comprising: (a) synthesizing siNA molecules of the invention, which can be chemically-modified, wherein the siNA comprises a single stranded sequence having complementarity to RNA of the SREBP1 target gene; and (b) contacting the cell in vitro or in vivo with the siNA molecule under conditions suitable to modulate (e.g., inhibit) the expression of the SREBP1 target genes in the cell.

[0270] In one embodiment, the invention features a method of modulating the expression of a SREBP1 target gene in a tissue explant ((e.g., liver or any other organ, tissue or cell as can be transplanted from one organism to another or back to the same organism from which the organ, tissue or cell is derived) comprising: (a) synthesizing a siNA molecule of the invention, which can be chemically-modified, wherein the siNA comprises a single stranded sequence having complementarity to RNA of the SREBP1 target gene; and (b) contacting a cell of the tissue explant derived from a particular subject or organism with the siNA molecule under conditions suitable to modulate (e.g., inhibit) the expression of the SREBP1 target gene in the tissue explant. In another embodiment, the method further comprises introducing the tissue explant back into the subject or organism the tissue was derived from or into another subject or organism under conditions suitable to modulate (e.g., inhibit) the expression of the SREBP1 target gene in that subject or organism.

[0271] In another embodiment, the invention features a method of modulating the expression of more than one SREBP1 target gene in a tissue explant (e.g., liver or any other organ, tissue or cell as can be transplanted from one organism to another or back to the same organism from which the organ, tissue or cell is derived) comprising: (a) synthesizing siNA molecules of the invention, which can be chemically-modified, wherein the siNA comprises a single stranded sequence having complementarity to RNA of the SREBP1 target gene; and (b) introducing the siNA molecules into a cell of the tissue explant derived from a particular subject or organism under conditions suitable to modulate (e.g., inhibit) the expression of the SREBP1 target genes in the tissue explant. In another embodiment, the method further comprises introducing the tissue explant back into the subject or organism the tissue was derived from or into another subject or organism under conditions suitable to modulate (e.g., inhibit) the expression of the SREBP1 target genes in that subject or organism.

[0272] In one embodiment, the invention features a method of modulating the expression of a SREBP1 target gene in a subject or organism comprising: (a) synthesizing a siNA molecule of the invention, which can be chemically-modified, wherein the siNA comprises a single stranded sequence having complementarity to RNA of the SREBP1 target gene; and (b) introducing the siNA molecule into the subject or organism under conditions suitable to modulate (e.g., inhibit) the expression of the SREBP1 target gene in the subject or organism.

[0273] In another embodiment, the invention features a method of modulating the expression of more than one SREBP1 target gene in a subject or organism comprising: (a) synthesizing siNA molecules of the invention, which can be chemically-modified, wherein the siNA comprises a single stranded sequence having complementarity to RNA of the SREBP1 target gene; and (b) introducing the siNA molecules into the subject or organism under conditions suitable to modulate (e.g., inhibit) the expression of the SREBP1 target genes in the subject or organism.

[0274] In one embodiment, the invention features a method of modulating the expression of a SREBP1 target gene in a subject or organism comprising contacting the subject or organism with a siNA molecule of the invention under conditions suitable to modulate (e.g., inhibit) the expression of the SREBP1 target gene in the subject or organism.

[0275] In one embodiment, the invention features a method for treating or preventing a disease, disorder, trait or condition related to SREBP1 gene expression or SREBP1 activity in a subject or organism comprising contacting the subject or organism with a siNA molecule of the invention under conditions suitable to modulate the expression of the SREBP1 target gene in the subject or organism. The reduction of gene expression and thus reduction in the level of the respective protein/RNA relieves, to some extent, the symptoms of the disease, disorder, trait or condition.

[0276] In one embodiment, the invention features a method for treating or preventing one or more metabolic diseases, traits, or conditions in a subject or organism comprising contacting the subject or organism with a siNA molecule of the invention under conditions suitable to modulate the expression of the SREBP1 target gene in the subject or organism whereby the treatment or prevention of the metabolic disease(s), trait(s), or condition(s) can be achieved. In one embodiment, the invention features contacting the subject or organism with a siNA molecule of the invention via local administration to relevant tissues or cells. In one embodiment, the invention features contacting the subject or organism with a siNA molecule of the invention via systemic administration (such as via intravenous, intramuscular, subcutaneous, or GI administration of siNA) to relevant tissues or cells, such as tissues or cells involved in the maintenance or development of the metabolic disease, trait, or condition in a subject or organism (e.g., liver, pancreas, small intestine, adipose tissue or cells). The siNA molecule of the invention can be formulated or conjugated as described herein or otherwise known in the art to target appropriate tissues or cells in the subject or organism (e.g., liver, pancreas, small intestine, adipose tissue or cells). The siNA molecule can be combined with other therapeutic treatments and modalities as are known in the art for the treatment of or prevention of metabolic diseases, traits, or conditions in a subject or organism. In one embodiment, the metabolic disease is selected from the group consisting of hypercholesterolemia, hyperlipidemia, dyslipidemia, diabetis (e.g., type I and/or type II diabetis), insulin resistance, obesity, or related conditions, including but not limited to sleep apnea, hiatal hernia, reflux esophagisitis, osteoarthritis, gout, cancers associated with weight gain, gallstones, kidney stones, pulmonary hypertension, infertility, cardiovascular disease, above normal weight, and above normal lipid levels, uric acid levels, or oxalate levels.

[0277] In one embodiment, the invention features a method for treating or preventing one or more metabolic diseases, traits, or conditions in a subject or organism comprising contacting the subject or organism with a siNA molecule of the invention under conditions suitable to modulate (e.g., inhibit) the expression of an inhibitor of SREBP1 gene expression in the subject or organism. In one embodiment, the inhibitor of SREBP1 gene expression is a miRNA.

[0278] In one embodiment, the invention features a method for treating or preventing one or more cardiovascular diseases, traits, or conditions in a subject or organism comprising contacting the subject or organism with a siNA molecule of the invention under conditions suitable to modulate the expression of the SREBP1 target gene in the subject or organism whereby the treatment or prevention of the cardiovascular disease(s), trait(s), or condition(s) can be achieved. In one embodiment, the invention features contacting the subject or organism with a siNA molecule of the invention via local administration to relevant tissues or cells, e.g., liver, pancreas, small intestine, adipose tissue or cells tissues or cells. In one embodiment, the invention features contacting the subject or organism with a siNA molecule of the invention via systemic administration (such as via intravenous, intramuscular, subcutaneous, or GI administration of siNA) to relevant tissues or cells, such as tissues or cells involved in the maintenance or development of the cardiovascular disease, trait, or condition in a subject or organism. The siNA molecule of the invention can be formulated or conjugated as described herein or otherwise known in the art to target appropriate tissues or cells in the subject or organism. The siNA molecule can be combined with other therapeutic treatments and modalities as are known in the art for the treatment of or prevention of cardiovascular diseases, traits, or conditions in a subject or organism. In one embodiment the cardiovascular disease is selected from the group consisting of hypertension, coronary thrombosis, stroke, lipid syndromes, hyperglycemia, hypertriglyceridemia, hyperlipidemia, ischemia, congestive heart failure, and myocardial infarction.

[0279] In one embodiment, the invention features a method for treating or preventing one or more cardiovascular diseases, traits, or conditions in a subject or organism comprising contacting the subject or organism with a siNA molecule of the invention under conditions suitable to modulate (e.g., inhibit) the expression of an inhibitor of SREBP1 gene expression in the subject or organism. In one embodiment, the inhibitor of SREBP1 gene expression is a miRNA.

[0280] In one embodiment, the invention features a method for weight loss in a subject or organism comprising contacting the subject or organism with a siNA molecule of the invention under conditions suitable to modulate the expression of the SREBP1 target gene in the subject or organism whereby the weight loss can be achieved. In one embodiment, the invention features contacting the subject or organism with a siNA molecule of the invention via local administration to relevant tissues or cells, e.g., liver, pancreas, small intestine, adipose tissue or cells. In one embodiment, the invention features contacting the subject or organism with a siNA molecule of the invention via systemic administration (such as via intravenous, intramuscular, subcutaneous, or GI administration of siNA) to relevant tissues or cells. The siNA molecule of the invention can be formulated or conjugated as described herein or otherwise known in the art to target appropriate tissues or cells in the subject or organism. The siNA molecule can be combined with other therapeutic treatments and modalities as are known in the art for weight loss in a subject or organism.

[0281] In one embodiment, the siNA molecule or double stranded nucleic acid molecule of the invention is formulated as a composition described in U.S. Provisional patent application No. 60/678,531 and in related U.S. Provisional patent application No. 60/703,946, filed Jul. 29, 2005, U.S. Provisional patent application No. 60/737,024, filed Nov. 15, 2005, and U.S. Ser. No. 11/353,630, filed Feb. 14, 2006 (Vargeese et al.).

[0282] In any of the methods herein for modulating the expression of one or more SREBP1 targets or for treating or preventing SREBP1 related diseases, traits, conditions, or phenotypes in a cell, subject, or organism, the siNA molecule of the invention modulates expression of one or more SREBP1 targets via RNA interference. In one embodiment, the RNA interference is RISC mediated cleavage of the SREBP1 target (e.g., siRNA mediated RNA interference). In one embodiment, the RNA interference is translational inhibition of the SREBP1 target (e.g., miRNA mediated RNA interference). In one embodiment, the RNA interference is transcriptional inhibition of the SREBP1 target (e.g., siRNA mediated transcriptional silencing). In one embodiment, the RNA interference takes place in the cytoplasm. In one embodiment, the RNA interference takes place in the nucleus.

[0283] In any of the methods of treatment of the invention, the siNA can be administered to the subject as a course of treatment, for example administration at various time intervals, such as once per day over the course of treatment, once every two days over the course of treatment, once every three days over the course of treatment, once every four days over the course of treatment, once every five days over the course of treatment, once every six days over the course of treatment, once per week over the course of treatment, once every other week over the course of treatment, once per month over the course of treatment, etc. In one embodiment, the course of treatment is once every 1, 2, 3, 4, 5, 6, 7, 8, 9, or 10 weeks. In one embodiment, the course of treatment is from about one to about 52 weeks or longer (e.g., indefinitely). In one embodiment, the course of treatment is from about one to about 48 months or longer (e.g., indefinitely).

[0284] In one embodiment, a course of treatment involves an initial course of treatment, such as once every 1, 2, 3, 4, 5, 6, 7, 8, 9, 10 or more weeks for a fixed interval (e.g., 1×, 2×, 3×, 4×, 5×, 6×, 7×, 8×, 9×, 10× or more) followed by a maintenance course of treatment, such as once every 4, 6, 8, 10, 15, 20, 25, 30, 35, 40, or more weeks for an additional fixed interval (e.g., 1×, 2×, 3×, 4×, 5×, 6×, 7×, 8×, 9×, 10× or more).

[0285] In any of the methods of treatment of the invention, the siNA can be administered to the subject systemically as described herein or otherwise known in the art, either alone as a monotherapy or in combination with additional therapies described herein or as are known in the art. Systemic administration can include, for example, pulmonary (inhalation, nebulization etc.) intravenous, subcutaneous, intramuscular, catheterization, nasopharangeal, transdermal, or oral/gastrointestinal administration as is generally known in the art.

[0286] In one embodiment, in any of the methods of treatment or prevention of the invention, the siNA can be administered to the subject locally or to local tissues as described herein or otherwise known in the art, either alone as a monotherapy or in combination with additional therapies as are known in the art. Local administration can include, for example, inhalation, nebulization, catheterization, implantation, direct injection, dermal/transdermal application, stenting, ear/eye drops, or portal vein administration to relevant tissues, or any other local administration technique, method or procedure, as is generally known in the art.

[0287] In another embodiment, the invention features a method of modulating the expression of more than one SREBP1 target gene in a subject or organism comprising contacting the subject or organism with one or more siNA molecules of the invention under conditions suitable to modulate (e.g., inhibit) the expression of the SREBP1 target genes in the subject or organism.

[0288] The siNA molecules of the invention can be designed to down regulate or inhibit target gene expression through RNAi targeting of a variety of nucleic acid molecules. In one embodiment, the siNA molecules of the invention are used to target various DNA corresponding to a target gene, for example via heterochromatic silencing or transcriptional inhibition. In one embodiment, the siNA molecules of the invention are used to target various RNAs corresponding to a target gene, for example via RNA target cleavage or translational inhibition. Non-limiting examples of such RNAs include messenger RNA (mRNA), non-coding RNA (ncRNA) or regulatory elements (see for example Mattick, 2005, Science, 309, 1527-1528 and Clayerie, 2005, Science, 309, 1529-1530) which includes miRNA and other small RNAs, alternate RNA splice variants of target gene(s), post-transcriptionally modified RNA of target gene(s), pre-mRNA of target gene(s), and/or RNA templates. If alternate splicing produces a family of transcripts that are distinguished by usage of appropriate exons, the instant invention can be used to inhibit gene expression through the appropriate exons to specifically inhibit or to distinguish among the functions of gene family members. For example, a protein that contains an alternatively spliced transmembrane domain can be expressed in both membrane bound and secreted forms. Use of the invention to target the exon containing the transmembrane domain can be used to determine the functional consequences of pharmaceutical targeting of the membrane bound as opposed to the secreted form of the protein. Non-limiting examples of applications of the invention relating to targeting these RNA molecules include therapeutic pharmaceutical applications, cosmetic applications, veterinary applications, pharmaceutical discovery applications, molecular diagnostic and gene function applications, and gene mapping, for example using single nucleotide polymorphism mapping with siNA molecules of the invention. Such applications can be implemented using known gene sequences or from partial sequences available from an expressed sequence tag (EST).

[0289] In another embodiment, the siNA molecules of the invention are used to target conserved sequences corresponding to a gene family or gene families such as SREBP1 family genes (e.g., all known SREBP1 isotypes, or select groupings of SREBP1 isotypes, or both SREBP1 and SREBP2). As such, siNA molecules targeting multiple SREBP1 targets can provide increased therapeutic effect. In addition, by avoiding other SREBP1 isotypes, toxicity may be avoided.

[0290] In one embodiment, siNA molecules can be used to characterize pathways of gene function in a variety of applications. For example, the present invention can be used to inhibit the activity of target gene(s) in a pathway to determine the function of uncharacterized gene(s) in gene function analysis, mRNA function analysis, or translational analysis. The invention can be used to determine potential target gene pathways involved in various diseases and conditions toward pharmaceutical development. The invention can be used to understand pathways of gene expression involved in, for example metabolic and/or cardiovascular diseases, disorders, traits and conditions.

[0291] In one embodiment, siNA molecule(s) and/or methods of the invention are used to down regulate the expression of gene(s) that encode RNA referred to by Genbank Accession, for example, target genes encoding RNA sequence(s) referred to herein by Genbank Accession number, for example, Genbank Accession Nos. shown herein (e.g. in Table I) and in U.S. Ser. No. 10/923,536 and PCT/US03/05028, both incorporated by reference herein.

[0292] In one embodiment, the invention features a method comprising: (a) generating a library of siNA constructs having a predetermined complexity; and (b) assaying the siNA constructs of (a) above, under conditions suitable to determine RNAi target sites within the target RNA sequence. In one embodiment, the siNA molecules of (a) have strands of a fixed length, for example, about 23 nucleotides in length. In another embodiment, the siNA molecules of (a) are of differing length, for example having strands of about 15 to about 30 (e.g., about 15, 16, 17, 18, 19, 20, 21, 22, 23, 24, 25, 26, 27, 28, 29, or 30) nucleotides in length. In one embodiment, the assay can comprise a reconstituted in vitro siNA assay as described herein. In another embodiment, the assay can comprise a cell culture system in which target RNA is expressed. In another embodiment, fragments of target RNA are analyzed for detectable levels of cleavage, for example by gel electrophoresis, northern blot analysis, or RNAse protection assays, to determine the most suitable target site(s) within the target RNA sequence. The target RNA sequence can be obtained as is known in the art, for example, by cloning and/or transcription for in vitro systems, and by cellular expression in in vivo systems.

[0293] In one embodiment, the invention features a method comprising: (a) generating a randomized library of siNA constructs having a predetermined complexity, such as of 4^{N}, where N represents the number of base paired nucleotides in each of the siNA construct strands (eg. for a siNA construct having 21 nucleotide sense and antisense strands with 19 base pairs, the complexity would be 4¹⁹); and (b) assaying the siNA constructs of (a) above, under conditions suitable to determine RNAi target sites within the target RNA sequence. In another embodiment, the siNA molecules of (a) have strands of a fixed length, for example about 23 nucleotides in length. In yet another embodiment, the siNA molecules of (a) are of differing length, for example having strands of about 15 to about 30 (e.g., about 15, 16, 17, 18, 19, 20, 21, 22, 23, 24, 25, 26, 27, 28, 29, or 30) nucleotides in length. In one embodiment, the assay can comprise a reconstituted in vitro siNA assay as described in Example 6 herein. In another embodiment, the assay can comprise a cell culture system in which target RNA is expressed. In another embodiment, fragments of target RNA are analyzed for detectable levels of cleavage, for example, by gel electrophoresis, northern blot analysis, or RNAse protection assays, to determine the most suitable target site(s) within the target RNA sequence. The target RNA sequence can be obtained as is known in the art, for example, by cloning and/or transcription for in vitro systems, and by cellular expression in in vivo systems.

[0294] In another embodiment, the invention features a method comprising: (a) analyzing the sequence of a RNA target encoded by a target gene; (b) synthesizing one or more sets of siNA molecules having sequence complementary to one or more regions of the RNA of (a); and (c) assaying the siNA molecules of (b) under conditions suitable to determine RNAi targets within the target RNA sequence. In one embodiment, the siNA molecules of (b) have strands of a fixed length, for example about 23 nucleotides in length. In another embodiment, the siNA molecules of (b) are of differing length, for example having strands of about 15 to about 30 (e.g., about 15, 16, 17, 18, 19, 20, 21, 22, 23, 24, 25, 26, 27, 28, 29, or 30) nucleotides in length. In one embodiment, the assay can comprise a reconstituted in vitro siNA assay as described herein. In another embodiment, the assay can comprise a cell culture system in which target RNA is expressed. Fragments of target RNA are analyzed for detectable levels of cleavage, for example by gel electrophoresis, northern blot analysis, or RNAse protection assays, to determine the most suitable target site(s) within the target RNA sequence. The target RNA sequence can be obtained as is known in the art, for example, by cloning and/or transcription for in vitro systems, and by expression in in vivo systems.

[0295] By “target site” is meant a sequence within a target RNA that is “targeted” for cleavage mediated by a siNA construct which contains sequences within its antisense region that are complementary to the target sequence.

[0296] By “detectable level of cleavage” is meant cleavage of target RNA (and formation of cleaved product RNAs) to an extent sufficient to discern cleavage products above the background of RNAs produced by random degradation of the target RNA. Production of cleavage products from 1-5% of the target RNA is sufficient to detect above the background for most methods of detection.

[0297] In one embodiment, the invention features a composition comprising a siNA molecule of the invention, which can be chemically-modified, in a pharmaceutically acceptable carrier or diluent. In another embodiment, the invention features a pharmaceutical composition comprising siNA molecules of the invention, which can be chemically-modified, targeting one or more genes in a pharmaceutically acceptable carrier or diluent. In another embodiment, the invention features a method for diagnosing a disease, trait, or condition in a subject comprising administering to the subject a composition of the invention under conditions suitable for the diagnosis of the disease, trait, or condition in the subject. In another embodiment, the invention features a method for treating or preventing a disease, trait, or condition, such as metabolic and/or cardiovascular diseases, traits, conditions, or disorders in a subject, comprising administering to the subject a composition of the invention under conditions suitable for the treatment or prevention of the disease, trait, or condition in the subject, alone or in conjunction with one or more other therapeutic compounds.

[0298] In another embodiment, the invention features a method for validating a target gene target, comprising: (a) synthesizing a siNA molecule of the invention, which can be chemically-modified, wherein one of the siNA strands includes a sequence complementary to RNA of a target gene; (b) introducing the siNA molecule into a cell, tissue, subject, or organism under conditions suitable for modulating expression of the target gene in the cell, tissue, subject, or organism; and (c) determining the function of the gene by assaying for any phenotypic change in the cell, tissue, subject, or organism.

[0299] In another embodiment, the invention features a method for validating a target comprising: (a) synthesizing a siNA molecule of the invention, which can be chemically-modified, wherein one of the siNA strands includes a sequence complementary to RNA of a target gene; (b) introducing the siNA molecule into a biological system under conditions suitable for modulating expression of the target gene in the biological system; and (c) determining the function of the gene by assaying for any phenotypic change in the biological system.

[0300] By “biological system” is meant, material, in a purified or unpurified form, from biological sources, including but not limited to human or animal, wherein the system comprises the components required for RNAi activity. The term “biological system” includes, for example, a cell, tissue, subject, or organism, or extract thereof. The term biological system also includes reconstituted RNAi systems that can be used in an in vitro setting.

[0301] By “phenotypic change” is meant any detectable change to a cell that occurs in response to contact or treatment with a nucleic acid molecule of the invention (e.g., siNA). Such detectable changes include, but are not limited to, changes in shape, size, proliferation, motility, protein expression or RNA expression or other physical or chemical changes as can be assayed by methods known in the art. The detectable change can also include expression of reporter genes/molecules such as Green Florescent Protein (GFP) or various tags that are used to identify an expressed protein or any other cellular component that can be assayed.

[0302] In one embodiment, the invention features a kit containing a siNA molecule of the invention, which can be chemically-modified, that can be used to modulate the expression of a target gene in a biological system, including, for example, in a cell, tissue, subject, or organism. In another embodiment, the invention features a kit containing more than one siNA molecule of the invention, which can be chemically-modified, that can be used to modulate the expression of more than one target gene in a biological system, including, for example, in a cell, tissue, subject, or organism.

[0303] In one embodiment, the invention features a cell containing one or more siNA molecules of the invention, which can be chemically-modified. In another embodiment, the cell containing a siNA molecule of the invention is a mammalian cell. In yet another embodiment, the cell containing a siNA molecule of the invention is a human cell.

[0304] In one embodiment, the synthesis of a siNA molecule of the invention, which can be chemically-modified, comprises: (a) synthesis of two complementary strands of the siNA molecule; (b) annealing the two complementary strands together under conditions suitable to obtain a double-stranded siNA molecule. In another embodiment, synthesis of the two complementary strands of the siNA molecule is by solid phase oligonucleotide synthesis. In yet another embodiment, synthesis of the two complementary strands of the siNA molecule is by solid phase tandem oligonucleotide synthesis.

[0305] In one embodiment, the invention features a method for synthesizing a siNA duplex molecule comprising: (a) synthesizing a first oligonucleotide sequence strand of the siNA molecule, wherein the first oligonucleotide sequence strand comprises a cleavable linker molecule that can be used as a scaffold for the synthesis of the second oligonucleotide sequence strand of the siNA; (b) synthesizing the second oligonucleotide sequence strand of siNA on the scaffold of the first oligonucleotide sequence strand, wherein the second oligonucleotide sequence strand further comprises a chemical moiety than can be used to purify the siNA duplex; (c) cleaving the linker molecule of (a) under conditions suitable for the two siNA oligonucleotide strands to hybridize and form a stable duplex; and (d) purifying the siNA duplex utilizing the chemical moiety of the second oligonucleotide sequence strand. In one embodiment, cleavage of the linker molecule in (c) above takes place during deprotection of the oligonucleotide, for example, under hydrolysis conditions using an alkylamine base such as methylamine. In one embodiment, the method of synthesis comprises solid phase synthesis on a solid support such as controlled pore glass (CPG) or polystyrene, wherein the first sequence of (a) is synthesized on a cleavable linker, such as a succinyl linker, using the solid support as a scaffold. The cleavable linker in (a) used as a scaffold for synthesizing the second strand can comprise similar reactivity as the solid support derivatized linker, such that cleavage of the solid support derivatized linker and the cleavable linker of (a) takes place concomitantly. In another embodiment, the chemical moiety of (b) that can be used to isolate the attached oligonucleotide sequence comprises a trityl group, for example a dimethoxytrityl group, which can be employed in a trityl-on synthesis strategy as described herein. In yet another embodiment, the chemical moiety, such as a dimethoxytrityl group, is removed during purification, for example, using acidic conditions.

[0306] In a further embodiment, the method for siNA synthesis is a solution phase synthesis or hybrid phase synthesis wherein both strands of the siNA duplex are synthesized in tandem using a cleavable linker attached to the first sequence which acts a scaffold for synthesis of the second sequence. Cleavage of the linker under conditions suitable for hybridization of the separate siNA sequence strands results in formation of the double-stranded siNA molecule.

[0307] In another embodiment, the invention features a method for synthesizing a siNA duplex molecule comprising: (a) synthesizing one oligonucleotide sequence strand of the siNA molecule, wherein the sequence comprises a cleavable linker molecule that can be used as a scaffold for the synthesis of another oligonucleotide sequence; (b) synthesizing a second oligonucleotide sequence having complementarity to the first sequence strand on the scaffold of (a), wherein the second sequence comprises the other strand of the double-stranded siNA molecule and wherein the second sequence further comprises a chemical moiety than can be used to isolate the attached oligonucleotide sequence; (c) purifying the product of (b) utilizing the chemical moiety of the second oligonucleotide sequence strand under conditions suitable for isolating the full-length sequence comprising both siNA oligonucleotide strands connected by the cleavable linker and under conditions suitable for the two siNA oligonucleotide strands to hybridize and form a stable duplex. In one embodiment, cleavage of the linker molecule in (c) above takes place during deprotection of the oligonucleotide, for example, under hydrolysis conditions. In another embodiment, cleavage of the linker molecule in (c) above takes place after deprotection of the oligonucleotide. In another embodiment, the method of synthesis comprises solid phase synthesis on a solid support such as controlled pore glass (CPG) or polystyrene, wherein the first sequence of (a) is synthesized on a cleavable linker, such as a succinyl linker, using the solid support as a scaffold. The cleavable linker in (a) used as a scaffold for synthesizing the second strand can comprise similar reactivity or differing reactivity as the solid support derivatized linker, such that cleavage of the solid support derivatized linker and the cleavable linker of (a) takes place either concomitantly or sequentially. In one embodiment, the chemical moiety of (b) that can be used to isolate the attached oligonucleotide sequence comprises a trityl group, for example a dimethoxytrityl group.

[0308] In another embodiment, the invention features a method for making a double-stranded siNA molecule in a single synthetic process comprising: (a) synthesizing an oligonucleotide having a first and a second sequence, wherein the first sequence is complementary to the second sequence, and the first oligonucleotide sequence is linked to the second sequence via a cleavable linker, and wherein a terminal 5′-protecting group, for example, a 5′-O-dimethoxytrityl group (5′-O-DMT) remains on the oligonucleotide having the second sequence; (b) deprotecting the oligonucleotide whereby the deprotection results in the cleavage of the linker joining the two oligonucleotide sequences; and (c) purifying the product of (b) under conditions suitable for isolating the double-stranded siNA molecule, for example using a trityl-on synthesis strategy as described herein.

[0309] In another embodiment, the method of synthesis of siNA molecules of the invention comprises the teachings of Scaringe et al., U.S. Pat. Nos. 5,889,136; 6,008,400; and 6,111,086, incorporated by reference herein in their entirety.

[0310] In one embodiment, the invention features siNA constructs that mediate RNAi against a target polynucleotide (e.g., RNA or DNA target), wherein the siNA construct comprises one or more chemical modifications, for example, one or more chemical modifications having any of Formulae I-VII or any combination thereof that increases the nuclease resistance of the siNA construct.

[0311] In another embodiment, the invention features a method for generating siNA molecules with increased nuclease resistance comprising (a) introducing nucleotides having any of Formula I-VII or any combination thereof into a siNA molecule, and (b) assaying the siNA molecule of step (a) under conditions suitable for isolating siNA molecules having increased nuclease resistance.

[0312] In another embodiment, the invention features a method for generating siNA molecules with improved toxicologic profiles (e.g., having attenuated or no immunostimulatory properties) comprising (a) introducing nucleotides having any of Formula I-VII (e.g., siNA motifs referred to in Table IV) or any combination thereof into a siNA molecule, and (b) assaying the siNA molecule of step (a) under conditions suitable for isolating siNA molecules having improved toxicologic profiles.

[0313] In another embodiment, the invention features a method for generating siNA formulations with improved toxicologic profiles (e.g., having attenuated or no immunostimulatory properties) comprising (a) generating a siNA formulation comprising a siNA molecule of the invention and a delivery vehicle or delivery particle as described herein or as otherwise known in the art, and (b) assaying the siNA formulation of step (a) under conditions suitable for isolating siNA formulations having improved toxicologic profiles.

[0314] In another embodiment, the invention features a method for generating siNA molecules that do not stimulate an interferon response (e.g., no interferon response or attenuated interferon response) in a cell, subject, or organism, comprising (a) introducing nucleotides having any of Formula I-VII (e.g., siNA motifs referred to in Table IV) or any combination thereof into a siNA molecule, and (b) assaying the siNA molecule of step (a) under conditions suitable for isolating siNA molecules that do not stimulate an interferon response.

[0315] In another embodiment, the invention features a method for generating siNA formulations that do not stimulate an interferon response (e.g., no interferon response or attenuated interferon response) in a cell, subject, or organism, comprising (a) generating a siNA formulation comprising a siNA molecule of the invention and a delivery vehicle or delivery particle as described herein or as otherwise known in the art, and (b) assaying the siNA formulation of step (a) under conditions suitable for isolating siNA formulations that do not stimulate an interferon response. In one embodiment, the interferon comprises interferon alpha.

[0316] In another embodiment, the invention features a method for generating siNA molecules that do not stimulate an inflammatory or proinflammatory cytokine response (e.g., no cytokine response or attenuated cytokine response) in a cell, subject, or organism, comprising (a) introducing nucleotides having any of Formula I-VII (e.g., siNA motifs referred to in Table IV) or any combination thereof into a siNA molecule, and (b) assaying the siNA molecule of step (a) under conditions suitable for isolating siNA molecules that do not stimulate a cytokine response. In one embodiment, the cytokine comprises an interleukin such as interleukin-6 (IL-6) and/or tumor necrosis alpha (TNF-α).

[0317] In another embodiment, the invention features a method for generating siNA formulations that do not stimulate an inflammatory or proinflammatory cytokine response (e.g., no cytokine response or attenuated cytokine response) in a cell, subject, or organism, comprising (a) generating a siNA formulation comprising a siNA molecule of the invention and a delivery vehicle or delivery particle as described herein or as otherwise known in the art, and (b) assaying the siNA formulation of step (a) under conditions suitable for isolating siNA formulations that do not stimulate a cytokine response. In one embodiment, the cytokine comprises an interleukin such as interleukin-6 (IL-6) and/or tumor necrosis alpha (TNF-α).

[0318] In another embodiment, the invention features a method for generating siNA molecules that do not stimulate Toll-like Receptor (TLR) response (e.g., no TLR response or attenuated TLR response) in a cell, subject, or organism, comprising (a) introducing nucleotides having any of Formula I-VII (e.g., siNA motifs referred to in Table IV) or any combination thereof into a siNA molecule, and (b) assaying the siNA molecule of step (a) under conditions suitable for isolating siNA molecules that do not stimulate a TLR response. In one embodiment, the TLR comprises TLR3, TLR7, TLR8 and/or TLR9.

[0319] In another embodiment, the invention features a method for generating siNA formulations that do not stimulate a Toll-like Receptor (TLR) response (e.g., no TLR response or attenuated TLR response) in a cell, subject, or organism, comprising (a) generating a siNA formulation comprising a siNA molecule of the invention and a delivery vehicle or delivery particle as described herein or as otherwise known in the art, and (b) assaying the siNA formulation of step (a) under conditions suitable for isolating siNA formulations that do not stimulate a TLR response. In one embodiment, the TLR comprises TLR3, TLR7, TLR8 and/or TLR9.

[0320] In one embodiment, the invention features a chemically synthesized double stranded short interfering nucleic acid (siNA) molecule that directs cleavage of a target RNA via RNA interference (RNAi), wherein: (a) each strand of said siNA molecule is about 18 to about 38 nucleotides in length; (b) one strand of said siNA molecule comprises nucleotide sequence having sufficient complementarity to said target RNA for the siNA molecule to direct cleavage of the target RNA via RNA interference; and (c) wherein the nucleotide positions within said siNA molecule are chemically modified to reduce the immunostimulatory properties of the siNA molecule to a level below that of a corresponding unmodified siRNA molecule. Such siNA molecules are said to have an improved toxicologic profile compared to an unmodified or minimally modified siNA.

[0321] By “improved toxicologic profile”, is meant that the chemically modified or formulated siNA construct exhibits decreased toxicity in a cell, subject, or organism compared to an unmodified or unformulated siNA, or siNA molecule having fewer modifications or modifications that are less effective in imparting improved toxicology. Such siNA molecules are also considered to have “improved RNAi activity”. In a non-limiting example, siNA molecules and formulations with improved toxicologic profiles are associated with reduced immunostimulatory properties, such as a reduced, decreased or attenuated immunostimulatory response in a cell, subject, or organism compared to an unmodified or unformulated siNA, or siNA molecule having fewer modifications or modifications that are less effective in imparting improved toxicology. Such an improved toxicologic profile is characterized by abrogated or reduced immunostimulation, such as reduction or abrogation of induction of interferons (e.g., interferon alpha), inflammatory cytokines (e.g., interleukins such as IL-6, and/or TNF-alpha), and/or toll like receptors (e.g., TLR-3, TLR-7, TLR-8, and/or TLR-9). In one embodiment, a siNA molecule or formulation with an improved toxicological profile comprises no ribonucleotides. In one embodiment, a siNA molecule or formulation with an improved toxicological profile comprises less than 5 ribonucleotides (e.g., 1, 2, 3, or 4 ribonucleotides). In one embodiment, a siNA molecule or formulation with an improved toxicological profile comprises Stab 7, Stab 8, Stab 11, Stab 12, Stab 13, Stab 16, Stab 17, Stab 18, Stab 19, Stab 20, Stab 23, Stab 24, Stab 25, Stab 26, Stab 27, Stab 28, Stab 29, Stab 30, Stab 31, Stab 32, Stab 33, Stab 34, Stab 35, Stab 36 or any combination thereof (see Table IV). Herein, numeric Stab chemistries include both 2′-fluoro and 2′-OCF3 versions of the chemistries shown in Table IV. For example, “Stab 7/8” refers to both Stab 7/8 and Stab 7F/8F etc. In one embodiment, a siNA molecule or formulation with an improved toxicological profile comprises a siNA molecule of the invention and a formulation as described in United States Patent Application Publication No. 20030077829, incorporated by reference herein in its entirety including the drawings.

[0322] In one embodiment, the level of immunostimulatory response associated with a given siNA molecule can be measured as is described herein or as is otherwise known in the art, for example by determining the level of PKR/interferon response, proliferation, B-cell activation, and/or cytokine production in assays to quantitate the immunostimulatory response of particular siNA molecules (see, for example, Leifer et al., 2003, J Immunother. 26, 313-9; and U.S. Pat. No. 5,968,909, incorporated in its entirety by reference). In one embodiment, the reduced immunostimulatory response is between about 10% and about 100% compared to an unmodified or minimally modified siRNA molecule, e.g., about 10%, 20%, 30%, 40%, 50%, 60%, 70%, 80%, 90% or 100% reduced immunostimulatory response. In one embodiment, the immunostimulatory response associated with a siNA molecule can be modulated by the degree of chemical modification. For example, a siNA molecule having between about 10% and about 100%, e.g., about 10%, 20%, 30%, 40%, 50%, 60%, 70%, 80%, 90% or 100% or at least about 10%, 20%, 30%, 40%, 50%, 60%, 70%, 80%, 90% or 100% of the nucleotide positions in the siNA molecule modified can be selected to have a corresponding degree of immunostimulatory properties as described herein.

[0323] In one embodiment, the degree of reduced immunostimulatory response is selected for optimized RNAi activity. For example, retaining a certain degree of immunostimulation can be preferred to treat viral infection, where less than 100% reduction in immunostimulation may be preferred for maximal antiviral activity (e.g., about 10%, 20%, 30%, 40%, 50%, 60%, 70%, 80%, or 90% reduction in immunostimulation) whereas the inhibition of expression of an endogenous gene target may be preferred with siNA molecules that possess minimal immunostimulatory properties to prevent non-specific toxicity or off target effects (e.g., about 90% to about 100% reduction in immunostimulation).

[0324] In one embodiment, the invention features a chemically synthesized double stranded siNA molecule that directs cleavage of a target RNA via RNA interference (RNAi), wherein (a) each strand of said siNA molecule is about 18 to about 38 nucleotides in length; (b) one strand of said siNA molecule comprises nucleotide sequence having sufficient complementarity to said target RNA for the siNA molecule to direct cleavage of the target RNA via RNA interference; and (c) wherein one or more nucleotides of said siNA molecule are chemically modified to reduce the immunostimulatory properties of the siNA molecule to a level below that of a corresponding unmodified siNA molecule. In one embodiment, each starnd comprises at least about 18 nucleotides that are complementary to the nucleotides of the other strand.

[0325] In another embodiment, the siNA molecule comprising modified nucleotides to reduce the immunostimulatory properties of the siNA molecule comprises an antisense region having nucleotide sequence that is complementary to a nucleotide sequence of a target gene or a portion thereof and further comprises a sense region, wherein said sense region comprises a nucleotide sequence substantially similar to the nucleotide sequence of said target gene or portion thereof. In one embodiment thereof, the antisense region and the sense region comprise about 18 to about 38 nucleotides, wherein said antisense region comprises at least about 18 nucleotides that are complementary to nucleotides of the sense region. In one embodiment thereof, the pyrimidine nucleotides in the sense region are 2′-O-methyl pyrimidine nucleotides. In another embodiment thereof, the purine nucleotides in the sense region are 2′-deoxy purine nucleotides. In yet another embodiment thereof, the pyrimidine nucleotides present in the sense region are 2′-deoxy-2′-fluoro pyrimidine nucleotides. In another embodiment thereof, the pyrimidine nucleotides of said antisense region are 2′-deoxy-2′-fluoro pyrimidine nucleotides. In yet another embodiment thereof, the purine nucleotides of said antisense region are 2′-O-methyl purine nucleotides. In still another embodiment thereof, the purine nucleotides present in said antisense region comprise 2′-deoxypurine nucleotides. In another embodiment, the antisense region comprises a phosphorothioate internucleotide linkage at the 3′ end of said antisense region. In another embodiment, the antisense region comprises a glyceryl modification at a 3′ end of said antisense region.

[0326] In other embodiments, the siNA molecule comprising modified nucleotides to reduce the immunostimulatory properties of the siNA molecule can comprise any of the structural features of siNA molecules described herein. In other embodiments, the siNA molecule comprising modified nucleotides to reduce the immunostimulatory properties of the siNA molecule can comprise any of the chemical modifications of siNA molecules described herein.

[0327] In one embodiment, the invention features a method for generating a chemically synthesized double stranded siNA molecule having chemically modified nucleotides to reduce the immunostimulatory properties of the siNA molecule, comprising (a) introducing one or more modified nucleotides in the siNA molecule, and (b) assaying the siNA molecule of step (a) under conditions suitable for isolating an siNA molecule having reduced immunostimulatory properties compared to a corresponding siNA molecule having unmodified nucleotides. Each strand of the siNA molecule is about 18 to about 38 nucleotides in length. One strand of the siNA molecule comprises nucleotide sequence having sufficient complementarity to the target RNA for the siNA molecule to direct cleavage of the target RNA via RNA interference. In one embodiment, the reduced immunostimulatory properties comprise an abrogated or reduced induction of inflammatory or proinflammatory cytokines, such as interleukin-6 (IL-6) or tumor necrosis alpha (TNF-α), in response to the siNA being introduced in a cell, tissue, or organism. In another embodiment, the reduced immunostimulatory properties comprise an abrogated or reduced induction of Toll Like Receptors (TLRs), such as TLR3, TLR7, TLR8 or TLR9, in response to the siNA being introduced in a cell, tissue, or organism. In another embodiment, the reduced immunostimulatory properties comprise an abrogated or reduced induction of interferons, such as interferon alpha, in response to the siNA being introduced in a cell, tissue, or organism.

[0328] In one embodiment, the invention features siNA constructs that mediate RNAi against a target polynucleotide, wherein the siNA construct comprises one or more chemical modifications described herein that modulates the binding affinity between the sense and antisense strands of the siNA construct.

[0329] In another embodiment, the invention features a method for generating siNA molecules with increased binding affinity between the sense and antisense strands of the siNA molecule comprising (a) introducing nucleotides having any of Formula I-VII or any combination thereof into a siNA molecule, and (b) assaying the siNA molecule of step (a) under conditions suitable for isolating siNA molecules having increased binding affinity between the sense and antisense strands of the siNA molecule.

[0330] In one embodiment, the invention features siNA constructs that mediate RNAi against a target polynucleotide, wherein the siNA construct comprises one or more chemical modifications described herein that modulates the binding affinity between the antisense strand of the siNA construct and a complementary target RNA sequence within a cell.

[0331] In one embodiment, the invention features siNA constructs that mediate RNAi against a target polynucleotide, wherein the siNA construct comprises one or more chemical modifications described herein that modulates the binding affinity between the antisense strand of the siNA construct and a complementary target DNA sequence within a cell.

[0332] In another embodiment, the invention features a method for generating siNA molecules with increased binding affinity between the antisense strand of the siNA molecule and a complementary target RNA sequence comprising (a) introducing nucleotides having any of Formula I-VII or any combination thereof into a siNA molecule, and (b) assaying the siNA molecule of step (a) under conditions suitable for isolating siNA molecules having increased binding affinity between the antisense strand of the siNA molecule and a complementary target RNA sequence.

[0333] In another embodiment, the invention features a method for generating siNA molecules with increased binding affinity between the antisense strand of the siNA molecule and a complementary target DNA sequence comprising (a) introducing nucleotides having any of Formula I-VII or any combination thereof into a siNA molecule, and (b) assaying the siNA molecule of step (a) under conditions suitable for isolating siNA molecules having increased binding affinity between the antisense strand of the siNA molecule and a complementary target DNA sequence.

[0334] In one embodiment, the invention features siNA constructs that mediate RNAi against a target polynucleotide, wherein the siNA construct comprises one or more chemical modifications described herein that modulate the polymerase activity of a cellular polymerase capable of generating additional endogenous siNA molecules having sequence homology to the chemically-modified siNA construct.

[0335] In another embodiment, the invention features a method for generating siNA molecules capable of mediating increased polymerase activity of a cellular polymerase capable of generating additional endogenous siNA molecules having sequence homology to a chemically-modified siNA molecule comprising (a) introducing nucleotides having any of Formula I-VII or any combination thereof into a siNA molecule, and (b) assaying the siNA molecule of step (a) under conditions suitable for isolating siNA molecules capable of mediating increased polymerase activity of a cellular polymerase capable of generating additional endogenous siNA molecules having sequence homology to the chemically-modified siNA molecule.

[0336] In one embodiment, the invention features chemically-modified siNA constructs that mediate RNAi against a target polynucleotide in a cell, wherein the chemical modifications do not significantly effect the interaction of siNA with a target RNA molecule, DNA molecule and/or proteins or other factors that are essential for RNAi in a manner that would decrease the efficacy of RNAi mediated by such siNA constructs.

[0337] In another embodiment, the invention features a method for generating siNA molecules with improved RNAi specificity against polynucleotide targets comprising (a) introducing nucleotides having any of Formula I-VII or any combination thereof into a siNA molecule, and (b) assaying the siNA molecule of step (a) under conditions suitable for isolating siNA molecules having improved RNAi specificity. In one embodiment, improved specificity comprises having reduced off target effects compared to an unmodified siNA molecule. For example, introduction of terminal cap moieties at the 3′-end, 5′-end, or both 3′ and 5′-ends of the sense strand or region of a siNA molecule of the invention can direct the siNA to have improved specificity by preventing the sense strand or sense region from acting as a template for RNAi activity against a corresponding target having complementarity to the sense strand or sense region.

[0338] In another embodiment, the invention features a method for generating siNA molecules with improved RNAi activity against a target polynucleotide comprising (a) introducing nucleotides having any of Formula I-VII or any combination thereof into a siNA molecule, and (b) assaying the siNA molecule of step (a) under conditions suitable for isolating siNA molecules having improved RNAi activity.

[0339] In yet another embodiment, the invention features a method for generating siNA molecules with improved RNAi activity against a target RNA comprising (a) introducing nucleotides having any of Formula I-VII or any combination thereof into a siNA molecule, and (b) assaying the siNA molecule of step (a) under conditions suitable for isolating siNA molecules having improved RNAi activity against the target RNA.

[0340] In yet another embodiment, the invention features a method for generating siNA molecules with improved RNAi activity against a target DNA comprising (a) introducing nucleotides having any of Formula I-VII or any combination thereof into a siNA molecule, and (b) assaying the siNA molecule of step (a) under conditions suitable for isolating siNA molecules having improved RNAi activity against the target DNA.

[0341] In one embodiment, the invention features siNA constructs that mediate RNAi against a target polynucleotide, wherein the siNA construct comprises one or more chemical modifications described herein that modulates the cellular uptake of the siNA construct, such as cholesterol conjugation of the siNA.

[0342] In another embodiment, the invention features a method for generating siNA molecules against a target polynucleotide with improved cellular uptake comprising (a) introducing nucleotides having any of Formula I-VII or any combination thereof into a siNA molecule, and (b) assaying the siNA molecule of step (a) under conditions suitable for isolating siNA molecules having improved cellular uptake.

[0343] In one embodiment, the invention features siNA constructs that mediate RNAi against a target polynucleotide, wherein the siNA construct comprises one or more chemical modifications described herein that increases the bioavailability of the siNA construct, for example, by attaching polymeric conjugates such as polyethyleneglycol or equivalent conjugates that improve the pharmacokinetics of the siNA construct, or by attaching conjugates that target specific tissue types or cell types in vivo. Non-limiting examples of such conjugates are described in Vargeese et al., U.S. Ser. No. 10/201,394 incorporated by reference herein.

[0344] In one embodiment, the invention features a method for generating siNA molecules of the invention with improved bioavailability comprising (a) introducing a conjugate into the structure of a siNA molecule, and (b) assaying the siNA molecule of step (a) under conditions suitable for isolating siNA molecules having improved bioavailability. Such conjugates can include ligands for cellular receptors, such as peptides derived from naturally occurring protein ligands; protein localization sequences, including cellular ZIP code sequences; antibodies; nucleic acid aptamers; vitamins and other co-factors, such as folate and N-acetylgalactosamine; polymers, such as polyethyleneglycol (PEG); phospholipids; cholesterol; cholesterol derivatives, polyamines, such as spermine or spermidine; and others.

[0345] In one embodiment, the invention features a double stranded short interfering nucleic acid (siNA) molecule that comprises a first nucleotide sequence complementary to a target RNA sequence or a portion thereof, and a second sequence having complementarity to said first sequence, wherein said second sequence is chemically modified in a manner that it can no longer act as a guide sequence for efficiently mediating RNA interference and/or be recognized by cellular proteins that facilitate RNAi. In one embodiment, the first nucleotide sequence of the siNA is chemically modified as described herein. In one embodiment, the first nucleotide sequence of the siNA is not modified (e.g., is all RNA).

[0346] In one embodiment, the invention features a double stranded short interfering nucleic acid (siNA) molecule that comprises a first nucleotide sequence complementary to a target RNA sequence or a portion thereof, and a second sequence having complementarity to said first sequence, wherein the second sequence is designed or modified in a manner that prevents its entry into the RNAi pathway as a guide sequence or as a sequence that is complementary to a target nucleic acid (e.g., RNA) sequence. In one embodiment, the first nucleotide sequence of the siNA is chemically modified as described herein. In one embodiment, the first nucleotide sequence of the siNA is not modified (e.g., is all RNA). Such design or modifications are expected to enhance the activity of siNA and/or improve the specificity of siNA molecules of the invention. These modifications are also expected to minimize any off-target effects and/or associated toxicity.

[0347] In one embodiment, the invention features a double stranded short interfering nucleic acid (siNA) molecule that comprises a first nucleotide sequence complementary to a target RNA sequence or a portion thereof, and a second sequence having complementarity to said first sequence, wherein said second sequence is incapable of acting as a guide sequence for mediating RNA interference. In one embodiment, the first nucleotide sequence of the siNA is chemically modified as described herein. In one embodiment, the first nucleotide sequence of the siNA is not modified (e.g., is all RNA).

[0348] In one embodiment, the invention features a double stranded short interfering nucleic acid (siNA) molecule that comprises a first nucleotide sequence complementary to a target RNA sequence or a portion thereof, and a second sequence having complementarity to said first sequence, wherein said second sequence does not have a terminal 5′-hydroxyl (5′-OH) or 5′-phosphate group.

[0349] In one embodiment, the invention features a double stranded short interfering nucleic acid (siNA) molecule that comprises a first nucleotide sequence complementary to a target RNA sequence or a portion thereof, and a second sequence having complementarity to said first sequence, wherein said second sequence comprises a terminal cap moiety at the 5′-end of said second sequence. In one embodiment, the terminal cap moiety comprises an inverted abasic, inverted deoxy abasic, inverted nucleotide moiety, a group shown in FIG. 10, an alkyl or cycloalkyl group, a heterocycle, or any other group that prevents RNAi activity in which the second sequence serves as a guide sequence or template for RNAi.

[0350] In one embodiment, the invention features a double stranded short interfering nucleic acid (siNA) molecule that comprises a first nucleotide sequence complementary to a target RNA sequence or a portion thereof, and a second sequence having complementarity to said first sequence, wherein said second sequence comprises a terminal cap moiety at the 5′-end and 3′-end of said second sequence. In one embodiment, each terminal cap moiety individually comprises an inverted abasic, inverted deoxy abasic, inverted nucleotide moiety, a group shown in FIG. 10, an alkyl or cycloalkyl group, a heterocycle, or any other group that prevents RNAi activity in which the second sequence serves as a guide sequence or template for RNAi.

[0351] In one embodiment, the invention features a method for generating siNA molecules of the invention with improved specificity for down regulating or inhibiting the expression of a target nucleic acid (e.g., a DNA or RNA such as a gene or its corresponding RNA), comprising (a) introducing one or more chemical modifications into the structure of a siNA molecule, and (b) assaying the siNA molecule of step (a) under conditions suitable for isolating siNA molecules having improved specificity. In another embodiment, the chemical modification used to improve specificity comprises terminal cap modifications at the 5′-end, 3′-end, or both 5′ and 3′-ends of the siNA molecule. The terminal cap modifications can comprise, for example, structures shown in FIG. 10 (e.g. inverted deoxyabasic moieties) or any other chemical modification that renders a portion of the siNA molecule (e.g. the sense strand) incapable of mediating RNA interference against an off target nucleic acid sequence. In a non-limiting example, a siNA molecule is designed such that only the antisense sequence of the siNA molecule can serve as a guide sequence for RISC mediated degradation of a corresponding target RNA sequence. This can be accomplished by rendering the sense sequence of the siNA inactive by introducing chemical modifications to the sense strand that preclude recognition of the sense strand as a guide sequence by RNAi machinery. In one embodiment, such chemical modifications comprise any chemical group at the 5′-end of the sense strand of the siNA, or any other group that serves to render the sense strand inactive as a guide sequence for mediating RNA interference. These modifications, for example, can result in a molecule where the 5′-end of the sense strand no longer has a free 5′-hydroxyl (5′-OH) or a free 5′-phosphate group (e.g., phosphate, diphosphate, triphosphate, cyclic phosphate etc.). Non-limiting examples of such siNA constructs are described herein, such as “Stab 9/10”, “Stab 7/8”, “Stab 7/19”, “Stab 17/22”, “Stab 23/24”, “Stab 24/25”, and “Stab 24/26” (e.g., any siNA having Stab 7, 9, 17, 23, or 24 sense strands) chemistries and variants thereof (see Table IV) wherein the 5′-end and 3′-end of the sense strand of the siNA do not comprise a hydroxyl group or phosphate group. Herein, numeric Stab chemistries include both 2′-fluoro and 2′-OCF3 versions of the chemistries shown in Table IV. For example, “Stab 7/8” refers to both Stab 7/8 and Stab 7F/8F etc.

[0352] In one embodiment, the invention features a method for generating siNA molecules of the invention with improved specificity for down regulating or inhibiting the expression of a SREBP1 target nucleic acid (e.g., a DNA or RNA such as a gene or its corresponding RNA), comprising introducing one or more chemical modifications into the structure of a siNA molecule that prevent a strand or portion of the siNA molecule from acting as a template or guide sequence for RNAi activity. In one embodiment, the inactive strand or sense region of the siNA molecule is the sense strand or sense region of the siNA molecule, i.e. the strand or region of the siNA that does not have complementarity to the target nucleic acid sequence. In one embodiment, such chemical modifications comprise any chemical group at the 5′-end of the sense strand or region of the siNA that does not comprise a 5′-hydroxyl (5′-OH) or 5′-phosphate group, or any other group that serves to render the sense strand or sense region inactive as a guide sequence for mediating RNA interference. Non-limiting examples of such siNA constructs are described herein, such as “Stab 9/10”, “Stab 7/8”, “Stab 7/19”, “Stab 17/22”, “Stab 23/24”, “Stab 24/25”, and “Stab 24/26” (e.g., any siNA having Stab 7, 9, 17, 23, or 24 sense strands) chemistries and variants thereof (see Table IV) wherein the 5′-end and 3′-end of the sense strand of the siNA do not comprise a hydroxyl group or phosphate group. Herein, numeric Stab chemistries include both 2′-fluoro and 2′-OCF3 versions of the chemistries shown in Table IV. For example, “Stab 7/8” refers to both Stab 7/8 and Stab 7F/8F etc.

[0353] In one embodiment, the invention features a method for screening siNA molecules that are active in mediating RNA interference against a target nucleic acid sequence comprising (a) generating a plurality of unmodified siNA molecules, (b) screening the siNA molecules of step (a) under conditions suitable for isolating siNA molecules that are active in mediating RNA interference against the target nucleic acid sequence, and (c) introducing chemical modifications (e.g. chemical modifications as described herein or as otherwise known in the art) into the active siNA molecules of (b). In one embodiment, the method further comprises re-screening the chemically modified siNA molecules of step (c) under conditions suitable for isolating chemically modified siNA molecules that are active in mediating RNA interference against the target nucleic acid sequence.

[0354] In one embodiment, the invention features a method for screening chemically modified siNA molecules that are active in mediating RNA interference against a target nucleic acid sequence comprising (a) generating a plurality of chemically modified siNA molecules (e.g. siNA molecules as described herein or as otherwise known in the art), and (b) screening the siNA molecules of step (a) under conditions suitable for isolating chemically modified siNA molecules that are active in mediating RNA interference against the target nucleic acid sequence.

[0355] The term “ligand” refers to any compound or molecule, such as a drug, peptide, hormone, or neurotransmitter, that is capable of interacting with another compound, such as a receptor, either directly or indirectly. The receptor that interacts with a ligand can be present on the surface of a cell or can alternately be an intercellular receptor. Interaction of the ligand with the receptor can result in a biochemical reaction, or can simply be a physical interaction or association.

[0356] In another embodiment, the invention features a method for generating siNA molecules of the invention with improved bioavailability comprising (a) introducing an excipient formulation to a siNA molecule, and (b) assaying the siNA molecule of step (a) under conditions suitable for isolating siNA molecules having improved bioavailability. Such excipients include polymers such as cyclodextrins, lipids, cationic lipids, polyamines, phospholipids, nanoparticles, receptors, ligands, and others.

[0357] In another embodiment, the invention features a method for generating siNA molecules of the invention with improved bioavailability comprising (a) introducing nucleotides having any of Formulae I-VII or any combination thereof into a siNA molecule, and (b) assaying the siNA molecule of step (a) under conditions suitable for isolating siNA molecules having improved bioavailability.

[0358] In another embodiment, polyethylene glycol (PEG) can be covalently attached to siNA compounds of the present invention. The attached PEG can be any molecular weight, preferably from about 100 to about 50,000 daltons (Da).

[0359] The present invention can be used alone or as a component of a kit having at least one of the reagents necessary to carry out the in vitro or in vivo introduction of RNA to test samples and/or subjects. For example, preferred components of the kit include a siNA molecule of the invention and a vehicle that promotes introduction of the siNA into cells of interest as described herein (e.g., using lipids and other methods of transfection known in the art, see for example Beigelman et al, U.S. Pat. No. 6,395,713). The kit can be used for target validation, such as in determining gene function and/or activity, or in drug optimization, and in drug discovery (see for example Usman et al., U.S. Ser. No. 60/402,996). Such a kit can also include instructions to allow a user of the kit to practice the invention.

[0360] The term “short interfering nucleic acid”, “siNA”, “short interfering RNA”, “siRNA”, “short interfering nucleic acid molecule”, “short interfering oligonucleotide molecule”, or “chemically-modified short interfering nucleic acid molecule” as used herein refers to any nucleic acid molecule capable of inhibiting or down regulating gene expression or viral replication by mediating RNA interference “RNAi” or gene silencing in a sequence-specific manner. These terms can refer to both individual nucleic acid molecules, a plurality of such nucleic acid molecules, or pools of such nucleic acid molecules. The siNA can be a double-stranded nucleic acid molecule comprising self-complementary sense and antisense regions, wherein the antisense region comprises nucleotide sequence that is complementary to nucleotide sequence in a target nucleic acid molecule or a portion thereof and the sense region having nucleotide sequence corresponding to the target nucleic acid sequence or a portion thereof. The siNA can be assembled from two separate oligonucleotides, where one strand is the sense strand and the other is the antisense strand, wherein the antisense and sense strands are self-complementary (i.e., each strand comprises nucleotide sequence that is complementary to nucleotide sequence in the other strand; such as where the antisense strand and sense strand form a duplex or double stranded structure, for example wherein the double stranded region is about 15 to about 30, e.g., about 15, 16, 17, 18, 19, 20, 21, 22, 23, 24, 25, 26, 27, 28, 29 or 30 base pairs; the antisense strand comprises nucleotide sequence that is complementary to nucleotide sequence in a target nucleic acid molecule or a portion thereof and the sense strand comprises nucleotide sequence corresponding to the target nucleic acid sequence or a portion thereof (e.g., about 15 to about 25 or more nucleotides of the siNA molecule are complementary to the target nucleic acid or a portion thereof). Alternatively, the siNA is assembled from a single oligonucleotide, where the self-complementary sense and antisense regions of the siNA are linked by means of a nucleic acid based or non-nucleic acid-based linker(s). The siNA can be a polynucleotide with a duplex, asymmetric duplex, hairpin or asymmetric hairpin secondary structure, having self-complementary sense and antisense regions, wherein the antisense region comprises nucleotide sequence that is complementary to nucleotide sequence in a separate target nucleic acid molecule or a portion thereof and the sense region having nucleotide sequence corresponding to the target nucleic acid sequence or a portion thereof. The siNA can be a circular single-stranded polynucleotide having two or more loop structures and a stem comprising self-complementary sense and antisense regions, wherein the antisense region comprises nucleotide sequence that is complementary to nucleotide sequence in a target nucleic acid molecule or a portion thereof and the sense region having nucleotide sequence corresponding to the target nucleic acid sequence or a portion thereof, and wherein the circular polynucleotide can be processed either in vivo or in vitro to generate an active siNA molecule capable of mediating RNAi. The siNA can also comprise a single stranded polynucleotide having nucleotide sequence complementary to nucleotide sequence in a target nucleic acid molecule or a portion thereof (for example, where such siNA molecule does not require the presence within the siNA molecule of nucleotide sequence corresponding to the target nucleic acid sequence or a portion thereof), wherein the single stranded polynucleotide can further comprise a terminal phosphate group, such as a 5′-phosphate (see for example Martinez et al., 2002, Cell., 110, 563-574 and Schwarz et al., 2002, Molecular Cell, 10, 537-568), or 5′,3′-diphosphate. In certain embodiments, the siNA molecule of the invention comprises separate sense and antisense sequences or regions, wherein the sense and antisense regions are covalently linked by nucleotide or non-nucleotide linkers molecules as is known in the art, or are alternately non-covalently linked by ionic interactions, hydrogen bonding, van der waals interactions, hydrophobic interactions, and/or stacking interactions. In certain embodiments, the siNA molecules of the invention comprise nucleotide sequence that is complementary to nucleotide sequence of a target gene. In another embodiment, the siNA molecule of the invention interacts with nucleotide sequence of a target gene in a manner that causes inhibition of expression of the target gene. As used herein, siNA molecules need not be limited to those molecules containing only RNA, but further encompasses chemically-modified nucleotides and non-nucleotides. In certain embodiments, the short interfering nucleic acid molecules of the invention lack 2′-hydroxy (2′-OH) containing nucleotides. Applicant describes in certain embodiments short interfering nucleic acids that do not require the presence of nucleotides having a 2′-hydroxy group for mediating RNAi and as such, short interfering nucleic acid molecules of the invention optionally do not include any ribonucleotides (e.g., nucleotides having a 2′-OH group). Such siNA molecules that do not require the presence of ribonucleotides within the siNA molecule to support RNAi can however have an attached linker or linkers or other attached or associated groups, moieties, or chains containing one or more nucleotides with 2′-OH groups. Optionally, siNA molecules can comprise ribonucleotides at about 5, 10, 20, 30, 40, or 50% of the nucleotide positions. The modified short interfering nucleic acid molecules of the invention can also be referred to as short interfering modified oligonucleotides “siMON.” As used herein, the term siNA is meant to be equivalent to other terms used to describe nucleic acid molecules that are capable of mediating sequence specific RNAi, for example short interfering RNA (siRNA), double-stranded RNA (dsRNA), micro-RNA (miRNA), short hairpin RNA (shRNA), short interfering oligonucleotide, short interfering nucleic acid, short interfering modified oligonucleotide, chemically-modified siRNA, post-transcriptional gene silencing RNA (ptgsRNA), and others. Non limiting examples of siNA molecules of the invention are shown in FIGS. 4-6, and Tables II and III herein. Such siNA molecules are distinct from other nucleic acid technologies known in the art that mediate inhibition of gene expression, such as ribozymes, antisense, triplex forming, aptamer, 2,5-A chimera, or decoy oligonucleotides.

[0361] By “RNA interference” or “RNAi” is meant a biological process of inhibiting or down regulating gene expression in a cell as is generally known in the art and which is mediated by short interfering nucleic acid molecules, see for example Zamore and Haley, 2005, Science, 309, 1519-1524; Vaughn and Martienssen, 2005, Science, 309, 1525-1526; Zamore et al., 2000, Cell, 101, 25-33; Bass, 2001, Nature, 411, 428-429; Elbashir et al., 2001, Nature, 411, 494-498; and Kreutzer et al., International PCT Publication No. WO 00/44895; Zernicka-Goetz et al., International PCT Publication No. WO 01/36646; Fire, International PCT Publication No. WO 99/32619; Plaetinck et al., International PCT Publication No. WO 00/01846; Mello and Fire, International PCT Publication No. WO 01/29058; Deschamps-Depaillette, International PCT Publication No. WO 99/07409; and Li et al., International PCT Publication No. WO 00/44914; Allshire, 2002, Science, 297, 1818-1819; Volpe et al., 2002, Science, 297, 1833-1837; Jenuwein, 2002, Science, 297, 2215-2218; and Hall et al., 2002, Science, 297, 2232-2237; Hutvagner and Zamore, 2002, Science, 297, 2056-60; McManus et al., 2002, RNA, 8, 842-850; Reinhart et al., 2002, Gene & Dev., 16, 1616-1626; and Reinhart & Bartel, 2002, Science, 297, 1831). In addition, as used herein, the term RNAi is meant to be equivalent to other terms used to describe sequence specific RNA interference, such as post transcriptional gene silencing, translational inhibition, transcriptional inhibition, or epigenetics. For example, siNA molecules of the invention can be used to epigenetically silence genes at both the post-transcriptional level or the pre-transcriptional level. In a non-limiting example, epigenetic modulation of gene expression by siNA molecules of the invention can result from siNA mediated modification of chromatin structure or methylation patterns to alter gene expression (see, for example, Verdel et al., 2004, Science, 303, 672-676; Pal-Bhadra et al., 2004, Science, 303, 669-672; Allshire, 2002, Science, 297, 1818-1819; Volpe et al., 2002, Science, 297, 1833-1837; Jenuwein, 2002, Science, 297, 2215-2218; and Hall et al., 2002, Science, 297, 2232-2237). In another non-limiting example, modulation of gene expression by siNA molecules of the invention can result from siNA mediated cleavage of RNA (either coding or non-coding RNA) via RISC, or alternately, translational inhibition as is known in the art. In another embodiment, modulation of gene expression by siNA molecules of the invention can result from transcriptional inhibition (see for example Janowski et al., 2005, Nature Chemical Biology, 1, 216-222).

[0362] In one embodiment, a siNA molecule of the invention is a duplex forming oligonucleotide “DFO”, (see for example FIGS. 14-15 and Vaish et al., U.S. Ser. No. 10/727,780 filed Dec. 3, 2003 and International PCT Application No. US04/16390, filed May 24, 2004).

[0363] In one embodiment, a siNA molecule of the invention is a multifunctional siNA, (see for example FIGS. 16-28 and Jadhav et al., U.S. Ser. No. 60/543,480 filed Feb. 10, 2004 and International PCT Application No. US04/16390, filed May 24, 2004). In one embodiment, the multifunctional siNA of the invention can comprise sequence targeting, for example, two or more regions of SREBP1 RNA (see for example target sequences in Tables II and III). In one embodiment, the multifunctional siNA of the invention can comprise sequence targeting one or more different SREBP1 targets, including coding regions and non-coding regions of SREBP1.

[0364] By “asymmetric hairpin” as used herein is meant a linear siNA molecule comprising an antisense region, a loop portion that can comprise nucleotides or non-nucleotides, and a sense region that comprises fewer nucleotides than the antisense region to the extent that the sense region has enough complementary nucleotides to base pair with the antisense region and form a duplex with loop. For example, an asymmetric hairpin siNA molecule of the invention can comprise an antisense region having length sufficient to mediate RNAi in a cell or in vitro system (e.g. about 15 to about 30, or about 15, 16, 17, 18, 19, 20, 21, 22, 23, 24, 25, 26, 27, 28, 29, or 30 nucleotides) and a loop region comprising about 4 to about 12 (e.g., about 4, 5, 6, 7, 8, 9, 10, 11, or 12) nucleotides, and a sense region having about 3 to about 25 (e.g., about 3, 4, 5, 6, 7, 8, 9, 10, 11, 12, 13, 14, 15, 16, 17, 18, 19, 20, 21, 22, 23, 24, or 25) nucleotides that are complementary to the antisense region. The asymmetric hairpin siNA molecule can also comprise a 5′-terminal phosphate group that can be chemically modified. The loop portion of the asymmetric hairpin siNA molecule can comprise nucleotides, non-nucleotides, linker molecules, or conjugate molecules as described herein.

[0365] By “asymmetric duplex” as used herein is meant a siNA molecule having two separate strands comprising a sense region and an antisense region, wherein the sense region comprises fewer nucleotides than the antisense region to the extent that the sense region has enough complementary nucleotides to base pair with the antisense region and form a duplex. For example, an asymmetric duplex siNA molecule of the invention can comprise an antisense region having length sufficient to mediate RNAi in a cell or in vitro system (e.g., about 15 to about 30, or about 15, 16, 17, 18, 19, 20, 21, 22, 23, 24, 25, 26, 27, 28, 29, or 30 nucleotides) and a sense region having about 3 to about 25 (e.g., about 3, 4, 5, 6, 7, 8, 9, 10, 11, 12, 13, 14, 15, 16, 17, 18, 19, 20, 21, 22, 23, 24, or 25) nucleotides that are complementary to the antisense region.

[0366] By “RNAi inhibitor” is meant any molecule that can down regulate, reduce or inhibit RNA interference function or activity in a cell or organism. An RNAi inhibitor can down regulate, reduce or inhibit RNAi (e.g., RNAi mediated cleavage of a target polynucleotide, translational inhibition, or transcriptional silencing) by interaction with or interfering the function of any component of the RNAi pathway, including protein components such as RISC, or nucleic acid components such as miRNAs or siRNAs. A RNAi inhibitor can be a siNA molecule, an antisense molecule, an aptamer, or a small molecule that interacts with or interferes with the function of RISC, a miRNA, or a siRNA or any other component of the RNAi pathway in a cell or organism. By inhibiting RNAi (e.g., RNAi mediated cleavage of a target polynucleotide, translational inhibition, or transcriptional silencing), a RNAi inhibitor of the invention can be used to modulate (e.g, up-regulate or down regulate) the expression of a target gene. In one embodiment, a RNA inhibitor of the invention is used to up-regulate gene expression by interfering with (e.g., reducing or preventing) endogenous down-regulation or inhibition of gene expression through translational inhibition, transcriptional silencing, or RISC mediated cleavage of a polynucleotide (e.g., mRNA). By interfering with mechanisms of endogenous repression, silencing, or inhibition of gene expression, RNAi inhibitors of the invention can therefore be used to up-regulate gene expression for the treatment of diseases, traits, or conditions resulting from a loss of function.

[0367] By “aptamer” or “nucleic acid aptamer” as used herein is meant a polynucleotide that binds specifically to a target molecule wherein the nucleic acid molecule has sequence that is distinct from sequence recognized by the target molecule in its natural setting. Alternately, an aptamer can be a nucleic acid molecule that binds to a target molecule where the target molecule does not naturally bind to a nucleic acid. The target molecule can be any molecule of interest. For example, the aptamer can be used to bind to a ligand-binding domain of a protein, thereby preventing interaction of the naturally occurring ligand with the protein. This is a non-limiting example and those in the art will recognize that other embodiments can be readily generated using techniques generally known in the art, see for example Gold et al., 1995, Annu. Rev. Biochem., 64, 763; Brody and Gold, 2000, J. Biotechnol., 74, 5; Sun, 2000, Curr. Opin. Mol. Ther., 2, 100; Kusser, 2000, J. Biotechnol., 74, 27; Hermann and Patel, 2000, Science, 287, 820; and Jayasena, 1999, Clinical Chemistry, 45, 1628. Aptamer molecules of the invention can be chemically modified as is generally known in the art or as described herein.

[0368] The term “antisense nucleic acid”, as used herein, refers to a nucleic acid molecule that binds to target RNA by means of RNA-RNA or RNA-DNA or RNA-PNA (protein nucleic acid; Egholm et al., 1993 Nature 365, 566) interactions and alters the activity of the target RNA (for a review, see Stein and Cheng, 1993 Science 261, 1004 and Woolf et al., U.S. Pat. No. 5,849,902) by steric interaction or by RNase H mediated target recognition. Typically, antisense molecules are complementary to a target sequence along a single contiguous sequence of the antisense molecule. However, in certain embodiments, an antisense molecule can bind to substrate such that the substrate molecule forms a loop, and/or an antisense molecule can bind such that the antisense molecule forms a loop. Thus, the antisense molecule can be complementary to two (or even more) non-contiguous substrate sequences or two (or even more) non-contiguous sequence portions of an antisense molecule can be complementary to a target sequence or both. For a review of current antisense strategies, see Schmajuk et al., 1999, J. Biol. Chem., 274, 21783-21789, Delihas et al., 1997, Nature, 15, 751-753, Stein et al., 1997, Antisense N. A. Drug Dev., 7, 151, Crooke, 2000, Methods Enzymol., 313, 345; Crooke, 1998, Biotech. Genet. Eng. Rev., 15, 121-157, Crooke, 1997, Ad. Pharmacol., 40, 149. In addition, antisense DNA or antisense modified with 2′-MOE and other modifications as are known in the art can be used to target RNA by means of DNA-RNA interactions, thereby activating RNase H, which digests the target RNA in the duplex. The antisense oligonucleotides can comprise one or more RNAse H activating region, which is capable of activating RNAse H cleavage of a target RNA. Antisense DNA can be synthesized chemically or expressed via the use of a single stranded DNA expression vector or equivalent thereof. Antisense molecules of the invention can be chemically modified as is generally known in the art or as described herein.

[0369] By “modulate” is meant that the expression of the gene, or level of a RNA molecule or equivalent RNA molecules encoding one or more proteins or protein subunits, or activity of one or more proteins or protein subunits is up regulated or down regulated, such that expression, level, or activity is greater than or less than that observed in the absence of the modulator. For example, the term “modulate” can mean “inhibit,” but the use of the word “modulate” is not limited to this definition.

[0370] By “inhibit”, “down-regulate”, or “reduce”, it is meant that the expression of the gene, or level of RNA molecules or equivalent RNA molecules encoding one or more proteins or protein subunits, or activity of one or more proteins or protein subunits, is reduced below that observed in the absence of the nucleic acid molecules (e.g., siNA) of the invention. In one embodiment, inhibition, down-regulation or reduction with an siNA molecule is below that level observed in the presence of an inactive or attenuated molecule. In another embodiment, inhibition, down-regulation, or reduction with siNA molecules is below that level observed in the presence of, for example, an siNA molecule with scrambled sequence or with mismatches. In another embodiment, inhibition, down-regulation, or reduction of gene expression with a nucleic acid molecule of the instant invention is greater in the presence of the nucleic acid molecule than in its absence. In one embodiment, inhibition, down regulation, or reduction of gene expression is associated with post transcriptional silencing, such as RNAi mediated cleavage of a target nucleic acid molecule (e.g. RNA) or inhibition of translation. In one embodiment, inhibition, down regulation, or reduction of gene expression is associated with pretranscriptional silencing, such as by alterations in DNA methylation patterns and DNA chromatin structure.

[0371] By “up-regulate”, or “promote”, it is meant that the expression of the gene, or level of RNA molecules or equivalent RNA molecules encoding one or more proteins or protein subunits, or activity of one or more proteins or protein subunits, is increased above that observed in the absence of the nucleic acid molecules (e.g., siNA) of the invention. In one embodiment, up-regulation or promotion of gene expression with an siNA molecule is above that level observed in the presence of an inactive or attenuated molecule. In another embodiment, up-regulation or promotion of gene expression with siNA molecules is above that level observed in the presence of, for example, an siNA molecule with scrambled sequence or with mismatches. In another embodiment, up-regulation or promotion of gene expression with a nucleic acid molecule of the instant invention is greater in the presence of the nucleic acid molecule than in its absence. In one embodiment, up-regulation or promotion of gene expression is associated with inhibition of RNA mediated gene silencing, such as RNAi mediated cleavage or silencing of a coding or non-coding RNA target that down regulates, inhibits, or silences the expression of the gene of interest to be up-regulated. The down regulation of gene expression can, for example, be induced by a coding RNA or its encoded protein, such as through negative feedback or antagonistic effects. The down regulation of gene expression can, for example, be induced by a non-coding RNA having regulatory control over a gene of interest, for example by silencing expression of the gene via translational inhibition, chromatin structure, methylation, RISC mediated RNA cleavage, or translational inhibition. As such, inhibition or down regulation of targets that down regulate, suppress, or silence a gene of interest can be used to up-regulate or promote expression of the gene of interest toward therapeutic use.

[0372] By “gene”, or “target gene” or “target DNA”, is meant a nucleic acid that encodes an RNA, for example, nucleic acid sequences including, but not limited to, structural genes encoding a polypeptide. A gene or target gene can also encode a functional RNA (fRNA) or non-coding RNA (ncRNA), such as small temporal RNA (stRNA), micro RNA (miRNA), small nuclear RNA (snRNA), short interfering RNA (siRNA), small nucleolar RNA (snRNA), ribosomal RNA (rRNA), transfer RNA (tRNA) and precursor RNAs thereof. Such non-coding RNAs can serve as target nucleic acid molecules for siNA mediated RNA interference in modulating the activity of fRNA or ncRNA involved in functional or regulatory cellular processes. Abberant fRNA or ncRNA activity leading to disease can therefore be modulated by siNA molecules of the invention. siNA molecules targeting fRNA and ncRNA can also be used to manipulate or alter the genotype or phenotype of a subject, organism or cell, by intervening in cellular processes such as genetic imprinting, transcription, translation, or nucleic acid processing (e.g., transamination, methylation etc.). The target gene can be a gene derived from a cell, an endogenous gene, a transgene, or exogenous genes such as genes of a pathogen, for example a virus, which is present in the cell after infection thereof. The cell containing the target gene can be derived from or contained in any organism, for example a plant, animal, protozoan, virus, bacterium, or fungus. Non-limiting examples of plants include monocots, dicots, or gymnosperms. Non-limiting examples of animals include vertebrates or invertebrates. Non-limiting examples of fungi include molds or yeasts. For a review, see for example Snyder and Gerstein, 2003, Science, 300, 258-260.

[0373] By “non-canonical base pair” is meant any non-Watson Crick base pair, such as mismatches and/or wobble base pairs, including flipped mismatches, single hydrogen bond mismatches, trans-type mismatches, triple base interactions, and quadruple base interactions. Non-limiting examples of such non-canonical base pairs include, but are not limited to, AC reverse Hoogsteen, AC wobble, AU reverse Hoogsteen, GU wobble, AA N7 amino, CC 2-carbonyl-amino(H1)-N-3-amino(H2), GA sheared, UC 4-carbonyl-amino, UU imino-carbonyl, AC reverse wobble, AU Hoogsteen, AU reverse Watson Crick, CG reverse Watson Crick, GC N3-amino-amino N3, AA N1-amino symmetric, AA N7-amino symmetric, GA N7-N1 amino-carbonyl, GA+carbonyl-amino N7-NI, GG N1-carbonyl symmetric, GG N3-amino symmetric, CC carbonyl-amino symmetric, CC N3-amino symmetric, UU 2-carbonyl-imino symmetric, UU 4-carbonyl-imino symmetric, AA amino-N3, AA N1-amino, AC amino 2-carbonyl, AC N3-amino, AC N7-amino, AU amino-4-carbonyl, AU N1-imino, AU N3-imino, AU N7-imino, CC carbonyl-amino, GA amino-N1, GA amino-N7, GA carbonyl-amino, GA N3-amino, GC amino-N3, GC carbonyl-amino, GC N3-amino, GC N7-amino, GG amino-N7, GG carbonyl-imino, GG N7-amino, GU amino-2-carbonyl, GU carbonyl-imino, GU imino-2-carbonyl, GU N7-imino, psiU imino-2-carbonyl, UC 4-carbonyl-amino, UC imino-carbonyl, UU imino-4-carbonyl, AC C2-H-N3, GA carbonyl-C2-H, UU imino-4-carbonyl 2 carbonyl-C5-H, AC amino(A) N3(C)-carbonyl, GC imino amino-carbonyl, Gpsi imino-2-carbonyl amino-2-carbonyl, and GU imino amino-2-carbonyl base pairs.

[0374] By “SREBP1” as used herein is meant, any Sterol Regulatory Element-Binding Protein 1 or SREBP1 protein, peptide, or polypeptide having SREBP1 activity, such as encoded by SREBP1 Genbank Accession Nos. shown in Table I. The term SREBP1 also refers to nucleic acid sequences encoding or regulating the expression of any SREBP1 protein, peptide, or polypeptide having SREBP1 activity. The term “SREBP1” is also meant to include other SREBP1 encoding sequence, such as SREBP1 sequences derived from various subjects or organisms, including other SRFBP isoforms (e.g., SREBP2), mutant SREBP1 genes, splice variants of SREBP1 genes, and SREBP1 gene polymorphisms.

[0375] By “SREBP1 pathway target” is meant any target involved in SREBP1 pathways of gene expression or activity, including such targets as ApoB, PCSK9, calcium/calmodulin-dependent protein kinase 1D, fatty acid binding protein 5, proprotein convertase subtilisin/kexin 9), LXR target genes, metalloprotease domain 11, apoptosis-inhibitory 6, and F-box-only protein 3.

[0376] By “target” as used herein is meant, any target protein, peptide, or polypeptide, such as encoded by Genbank Accession Nos. herein (see Table I) and in U.S. Ser. No. 10/923,536 and PCT/US03/05028, both incorporated by reference herein. The term “target” also refers to nucleic acid sequences or target polynucleotide sequence encoding any target protein, peptide, or polypeptide, such as proteins, peptides, or polypeptides encoded by sequences having Genbank Accession Nos. shown herein or in U.S. Ser. No. 10/923,536 and USSN PCT/US03/05028. The target of interest can include target polynucleotide sequences, such as target DNA or target RNA. The term “target” is also meant to include other sequences, such as differing isoforms, mutant target genes, splice variants of target polynucleotides, target polymorphisms, and non-coding (e.g., ncRNA, miRNA, stRNA) or other regulatory polynucleotide sequences as described herein. Therefore, in various embodiments of the invention, a double stranded nucleic acid molecule of the invention (e.g. siNA) having complementarity to a target RNA can be used to inhibit or down regulate miRNA or other ncRNA activity. In one embodiment, inhibition of miRNA or ncRNA activity can be used to down regulate or inhibit gene expression (e.g., gene targets described herein or otherwise known in the art) that is dependent on miRNA or ncRNA activity. In another embodiment, inhibition of miRNA or ncRNA activity by double stranded nucleic acid molecules of the invention (e.g. siNA) having complementarity to the miRNA or ncRNA can be used to up regulate or promote target gene expression (e.g., gene targets described herein or otherwise known in the art) where the expression of such genes is down regulated, suppressed, or silenced by the miRNA or ncRNA. Such up-regulation of gene expression can be used to treat diseases and conditions associated with a loss of function or haploinsufficiency as are generally known in the art.

[0377] In one embodiment, the target is any of SREBP1 RNA or a portion thereof.

[0378] In one embodiment, the target is any of SREBP1 DNA or a portion thereof.

[0379] In one embodiment, the target is any of SREBP1 mRNA or a portion thereof.

[0380] In one embodiment, the target is any of SREBP1 miRNA or a portion thereof.

[0381] In one embodiment, the target is any of SREBP1 siRNA or a portion thereof.

[0382] In one embodiment, the target is any of SREBP1 stRNA or a portion thereof.

[0383] In one embodiment, the target is a SREBP1 target and or SREBP1 pathway target or a portion thereof.

[0384] In one embodiment, the target is any (e.g., one or more) of target sequences shown in Table I or a portion thereof. In one embodiment, the target is any (e.g., one or more) of target sequences shown in Table II and III or a portion thereof. In another embodiment, the target is a siRNA, miRNA, or stRNA corresponding to any (e.g., one or more) target, upper strand, or lower strand sequence shown in Table II or III or a portion thereof. In another embodiment, the target is any siRNA, miRNA, or stRNA corresponding any (e.g., one or more) sequence shown in Table I or a portion thereof.

[0385] By “homologous sequence” is meant, a nucleotide sequence that is shared by one or more polynucleotide sequences, such as genes, gene transcripts and/or non-coding polynucleotides. For example, a homologous sequence can be a nucleotide sequence that is shared by two or more genes encoding related but different proteins, such as different members of a gene family, different protein epitopes, different protein isoforms or completely divergent genes, such as a cytokine and its corresponding receptors. A homologous sequence can be a nucleotide sequence that is shared by two or more non-coding polynucleotides, such as noncoding DNA or RNA, regulatory sequences, introns, and sites of transcriptional control or regulation. Homologous sequences can also include conserved sequence regions shared by more than one polynucleotide sequence. Homology does not need to be perfect homology (e.g., 100%), as partially homologous sequences are also contemplated by the instant invention (e.g., 99%, 98%, 97%, 96%, 95%, 94%, 93%, 92%, 91%, 90%, 89%, 88%, 87%, 86%, 85%, 84%, 83%, 82%, 81%, 80% etc.).

[0386] By “conserved sequence region” is meant, a nucleotide sequence of one or more regions in a polynucleotide does not vary significantly between generations or from one biological system, subject, or organism to another biological system, subject, or organism. The polynucleotide can include both coding and non-coding DNA and RNA.

[0387] By “sense region” is meant a nucleotide sequence of a siNA molecule having complementarity to an antisense region of the siNA molecule. In addition, the sense region of a siNA molecule can comprise a nucleic acid sequence having homology with a target nucleic acid sequence. In one embodiment, the sense region of the siNA molecule is referred to as the sense strand or passenger strand.

[0388] By “antisense region” is meant a nucleotide sequence of a siNA molecule having complementarity to a target nucleic acid sequence. In addition, the antisense region of a siNA molecule can optionally comprise a nucleic acid sequence having complementarity to a sense region of the siNA molecule. In one embodiment, the antisense region of the siNA molecule is referred to as the antisense strand or guide strand.

[0389] By “target nucleic acid” or “target polynucleotide” is meant any nucleic acid sequence (e.g, any SREBP1 and/or SREBP1 pathway sequence) whose expression or activity is to be modulated. The target nucleic acid can be DNA or RNA. In one embodiment, a target nucleic acid of the invention is target RNA or DNA.

[0390] By “complementarity” is meant that a nucleic acid can form hydrogen bond(s) with another nucleic acid sequence by either traditional Watson-Crick or other non-traditional types as described herein. In one embodiment, a double stranded nucleic acid molecule of the invention, such as an siNA molecule, wherein each strand is between 15 and 30 nucleotides in length, comprises between about 10% and about 100% (e.g., about 10%, 20%, 30%, 40%, 50%, 60%, 70%, 80%, 90%, or 100%) complementarity between the two strands of the double stranded nucleic acid molecule. In another embodiment, a double stranded nucleic acid molecule of the invention, such as an siNA molecule, where one strand is the sense strand and the other stand is the antisense strand, wherein each strand is between 15 and 30 nucleotides in length, comprises between at least about 10% and about 100% (e.g., at least about 10%, 20%, 30%, 40%, 50%, 60%, 70%, 80%, 90%, or 100%) complementarity between the nucleotide sequence in the antisense strand of the double stranded nucleic acid molecule and the nucleotide sequence of its corresponding target nucleic acid molecule, such as a target RNA or target mRNA or viral RNA. In one embodiment, a double stranded nucleic acid molecule of the invention, such as an siNA molecule, where one strand comprises nucleotide sequence that is referred to as the sense region and the other strand comprises a nucleotide sequence that is referred to as the antisense region, wherein each strand is between 15 and 30 nucleotides in length, comprises between about 10% and about 100% (e.g., about 10%, 20%, 30%, 40%, 50%, 60%, 70%, 80%, 90%, or 100%) complementarity between the sense region and the antisense region of the double stranded nucleic acid molecule. In reference to the nucleic molecules of the present invention, the binding free energy for a nucleic acid molecule with its complementary sequence is sufficient to allow the relevant function of the nucleic acid to proceed, e.g., RNAi activity. Determination of binding free energies for nucleic acid molecules is well known in the art (see, e.g., Turner et al., 1987, CSH Symp. Quant. Biol. LII pp. 123-133; Frier et al., 1986, Proc. Nat. Acad. Sci. USA 83:9373-9377; Turner et al., 1987, J. Am. Chem. Soc. 109:3783-3785). A percent complementarity indicates the percentage of contiguous residues in a nucleic acid molecule that can form hydrogen bonds (e.g., Watson-Crick base pairing) with a second nucleic acid sequence (e.g., 5, 6, 7, 8, 9, or 10 nucleotides out of a total of 10 nucleotides in the first oligonucleotide being based paired to a second nucleic acid sequence having 10 nucleotides represents 50%, 60%, 70%, 80%, 90%, and 100% complementary respectively). In one embodiment, a siNA molecule of the invention has perfect complementarity between the sense strand or sense region and the antisense strand or antisense region of the siNA molecule. In one embodiment, a siNA molecule of the invention is perfectly complementary to a corresponding target nucleic acid molecule. “Perfectly complementary” means that all the contiguous residues of a nucleic acid sequence will hydrogen bond with the same number of contiguous residues in a second nucleic acid sequence. In one embodiment, a siNA molecule of the invention comprises about 15 to about 30 or more (e.g., about 15, 16, 17, 18, 19, 20, 21, 22, 23, 24, 25, 26, 27, 28, 29, or 30 or more) nucleotides that are complementary to one or more target nucleic acid molecules or a portion thereof. In one embodiment, a siNA molecule of the invention has partial complementarity (i.e., less than 100% complementarity) between the sense strand or sense region and the antisense strand or antisense region of the siNA molecule or between the antisense strand or antisense region of the siNA molecule and a corresponding target nucleic acid molecule. For example, partial complementarity can include various mismatches or non-based paired nucleotides (e.g., 1, 2, 3, 4, 5 or more mismatches or non-based paired nucleotides) within the siNA structure which can result in bulges, loops, or overhangs that result between the between the sense strand or sense region and the antisense strand or antisense region of the siNA molecule or between the antisense strand or antisense region of the siNA molecule and a corresponding target nucleic acid molecule.

[0391] In one embodiment, a double stranded nucleic acid molecule of the invention, such as siNA molecule, has perfect complementarity between the sense strand or sense region and the antisense strand or antisense region of the nucleic acid molecule. In one embodiment, double stranded nucleic acid molecule of the invention, such as siNA molecule, is perfectly complementary to a corresponding target nucleic acid molecule.

[0392] In one embodiment, double stranded nucleic acid molecule of the invention, such as siNA molecule, has partial complementarity (i.e., less than 100% complementarity) between the sense strand or sense region and the antisense strand or antisense region of the double stranded nucleic acid molecule or between the antisense strand or antisense region of the nucleic acid molecule and a corresponding target nucleic acid molecule. For example, partial complementarity can include various mismatches or non-base paired nucleotides (e.g., 1, 2, 3, 4, 5 or more mismatches or non-based paired nucleotides, such as nucleotide bulges) within the double stranded nucleic acid molecule, structure which can result in bulges, loops, or overhangs that result between the sense strand or sense region and the antisense strand or antisense region of the double stranded nucleic acid molecule or between the antisense strand or antisense region of the double stranded nucleic acid molecule and a corresponding target nucleic acid molecule.

[0393] In one embodiment, double stranded nucleic acid molecule of the invention is a microRNA (miRNA). By “microRNA” or “miRNA” is meant, a small double stranded RNA that regulates the expression of target messenger RNAs either by mRNA cleavage, translational repression/inhibition or heterochromatic silencing (see for example Ambros, 2004, Nature, 431, 350-355; Bartel, 2004, Cell, 116, 281-297; Cullen, 2004, Virus Research., 102, 3-9; He et al., 2004, Nat. Rev. Genet., 5, 522-531; Ying et al., 2004, Gene, 342, 25-28; and Sethupathy et al., 2006, RNA, 12:192-197). In one embodiment, the microRNA of the invention, has partial complementarity (i.e., less than 100% complementarity) between the sense strand or sense region and the antisense strand or antisense region of the miRNA molecule or between the antisense strand or antisense region of the miRNA and a corresponding target nucleic acid molecule. For example, partial complementarity can include various mismatches or non-base paired nucleotides (e.g., 1, 2, 3, 4, 5 or more mismatches or non-based paired nucleotides, such as nucleotide bulges) within the double stranded nucleic acid molecule, structure which can result in bulges, loops, or overhangs that result between the sense strand or sense region and the antisense strand or antisense region of the miRNA or between the antisense strand or antisense region of the miRNA and a corresponding target nucleic acid molecule.

[0394] In one embodiment, siNA molecules of the invention that down regulate or reduce SREBP1 gene expression are used for preventing or treating metabolic and/or cardiovascular and related diseases, disorders, conditions, or traits in a subject or organism as described herein or otherwise known in the art.

[0395] By “metabolic disease” is meant any disease or condition affecting metabolic pathways as in known in the art. Metabolic disease can result in an abnormal metabolic process, either congenital due to inherited enzyme abnormality (inborn errors of metabolism) or acquired due to disease of an endocrine organ or failure of a metabolically important organ such as the liver. In one embodiment, metabolic disease includes hyperlipidemia, hypercholesterolemia, cardiovascular disease, atherosclerosis, hypertension, diabetis (e.g., type I and/or type II diabetis), insulin resistance, and/or obesity.

[0396] By “cardiovascular disease” is meant and disease or condition affecting the heart and vasculature, including but not limited to, coronary heart disease (CHD), cerebrovascular disease (CVD), aortic stenosis, peripheral vascular disease, atherosclerosis, arteriosclerosis, myocardial infarction (heart attack), cerebrovascular diseases (stroke), transient ischaemic attacks (TIA), angina (stable and unstable), atrial fibrillation, arrhythmia, valvular disease, congestive heart failure, hypercholesterolemia, type I hyperlipoproteinemia, type II hyperlipoproteinemia, type III hyperlipoproteinemia, type IV hyperlipoproteinemia, type V hyperlipoproteinemia, secondary hypertriglyceridemia, and familial lecithin cholesterol acyltransferase deficiency.

[0397] In one embodiment of the present invention, each sequence of a siNA molecule of the invention is independently about 15 to about 30 nucleotides in length, in specific embodiments about 15, 16, 17, 18, 19, 20, 21, 22, 23, 24, 25, 26, 27, 28, 29, or 30 nucleotides in length. In another embodiment, the siNA duplexes of the invention independently comprise about 15 to about 30 base pairs (e.g., about 15, 16, 17, 18, 19, 20, 21, 22, 23, 24, 25, 26, 27, 28, 29, or 30). In another embodiment, one or more strands of the siNA molecule of the invention independently comprises about 15 to about 30 nucleotides (e.g., about 15, 16, 17, 18, 19, 20, 21, 22, 23, 24, 25, 26, 27, 28, 29, or 30) that are complementary to a target nucleic acid molecule. In yet another embodiment, siNA molecules of the invention comprising hairpin or circular structures are about 35 to about 55 (e.g., about 35, 40, 45, 50 or 55) nucleotides in length, or about 38 to about 44 (e.g., about 38, 39, 40, 41, 42, 43, or 44) nucleotides in length and comprising about 15 to about 25 (e.g., about 15, 16, 17, 18, 19, 20, 21, 22, 23, 24, or 25) base pairs. Exemplary siNA molecules of the invention are shown in Tables II and III and/or FIGS. 4-5.

[0398] As used herein “cell” is used in its usual biological sense, and does not refer to an entire multicellular organism, e.g., specifically does not refer to a human. The cell can be present in an organism, e.g., birds, plants and mammals such as humans, cows, sheep, apes, monkeys, swine, dogs, and cats. The cell can be prokaryotic (e.g., bacterial cell) or eukaryotic (e.g., mammalian or plant cell). The cell can be of somatic or germ line origin, totipotent or pluripotent, dividing or non-dividing. The cell can also be derived from or can comprise a gamete or embryo, a stem cell, or a fully differentiated cell.

[0399] The siNA molecules of the invention are added directly, or can be complexed with cationic lipids, packaged within liposomes, or otherwise delivered to target cells or tissues. The nucleic acid or nucleic acid complexes can be locally administered to relevant tissues ex vivo, or in vivo through local delivery to the lung, with or without their incorporation in biopolymers. In particular embodiments, the nucleic acid molecules of the invention comprise sequences shown in Tables II-II and/or FIGS. 4-5. Examples of such nucleic acid molecules consist essentially of sequences defined in these tables and figures. Furthermore, the chemically modified constructs described in Table IV and the lipid nanoparticle (LNP) formulations shown in Table VI can be applied to any siNA sequence or group of siNA sequences of the invention.

[0400] In another aspect, the invention provides mammalian cells containing one or more siNA molecules of this invention. The one or more siNA molecules can independently be targeted to the same or different sites within a target polynucleotide of the invention.

[0401] By “RNA” is meant a molecule comprising at least one ribonucleotide residue. By “ribonucleotide” is meant a nucleotide with a hydroxyl group at the 2′ position of a β-D-ribofuranose moiety. The terms include double-stranded RNA, single-stranded RNA, isolated RNA such as partially purified RNA, essentially pure RNA, synthetic RNA, recombinantly produced RNA, as well as altered RNA that differs from naturally occurring RNA by the addition, deletion, substitution and/or alteration of one or more nucleotides. Such alterations can include addition of non-nucleotide material, such as to the end(s) of the siNA or internally, for example at one or more nucleotides of the RNA. Nucleotides in the RNA molecules of the instant invention can also comprise non-standard nucleotides, such as non-naturally occurring nucleotides or chemically synthesized nucleotides or deoxynucleotides. These altered RNAs can be referred to as analogs or analogs of naturally-occurring RNA.

[0402] By “subject” is meant an organism, which is a donor or recipient of explanted cells or the cells themselves. “Subject” also refers to an organism to which the nucleic acid molecules of the invention can be administered. A subject can be a mammal or mammalian cells, including a human or human cells. In one embodiment, the subject is an infant (e.g., subjects that are less than 1 month old, or 1, 2, 3, 4, 5, 6, 7, 8, 9 10, 11, or 12 months old). In one embodiment, the subject is a toddler (e.g., 1, 2, 3, 4, 5 or 6 years old). In one embodiment, the subject is a senior (e.g., anyone over the age of about 65 years of age).

[0403] By “chemical modification” as used herein is meant any modification of chemical structure of the nucleotides that differs from nucleotides of native siRNA or RNA. The term “chemical modification” encompasses the addition, substitution, or modification of native siRNA or RNA nucleosides and nucleotides with modified nucleosides and modified nucleotides as described herein or as is otherwise known in the art. Non-limiting examples of such chemical modifications include without limitation compositions having any of Formulae I, II, III, IV, V, VI, or VII herein, phosphorothioate internucleotide linkages, 2′-deoxyribonucleotides, 2′-O-methyl ribonucleotides, 2′-deoxy-2′-fluoro ribonucleotides, 4′-thio ribonucleotides, 2′-O-trifluoromethyl nucleotides, 2′-O-ethyl-trifluoromethoxy nucleotides, 2′-O-difluoromethoxy-ethoxy nucleotides (see for example U.S. Ser. No. 10/981,966 filed Nov. 5, 2004, incorporated by reference herein), FANA, “universal base” nucleotides, “acyclic” nucleotides, 5-C-methyl nucleotides, terminal glyceryl and/or inverted deoxy abasic residue incorporation, or a modification having any of Formulae I-VII herein. In one embodiment, the nucleic acid molecules of the invention (e.g, dsRNA, siNA etc.) are partially modified (e.g., about 5%, 10,%, 15%, 20%, 25%, 30%, 35%, 40%, 45%, 50%, 55%, 60%, 65%, 70%, 75%, 80%, 85%, 90%, or 95% modified) with chemical modifications. In another embodiment, the nucleic acid molecules of the invention (e.g, dsRNA, siNA etc.) are completely modified (e.g., about 100% modified) with chemical modifications.

[0404] The term “phosphorothioate” as used herein refers to an internucleotide linkage having Formula I, wherein Z and/or W comprise a sulfur atom. Hence, the term phosphorothioate refers to both phosphorothioate and phosphorodithioate internucleotide linkages.

[0405] The term “phosphonoacetate” as used herein refers to an internucleotide linkage having Formula I, wherein Z and/or W comprise an acetyl or protected acetyl group.

[0406] The term “thiophosphonoacetate” as used herein refers to an internucleotide linkage having Formula I, wherein Z comprises an acetyl or protected acetyl group and W comprises a sulfur atom or alternately W comprises an acetyl or protected acetyl group and Z comprises a sulfur atom.

[0407] The term “universal base” as used herein refers to nucleotide base analogs that form base pairs with each of the natural DNA/RNA bases with little discrimination between them. Non-limiting examples of universal bases include C-phenyl, C-naphthyl and other aromatic derivatives, inosine, azole carboxamides, and nitroazole derivatives such as 3-nitropyrrole, 4-nitroindole, 5-nitroindole, and 6-nitroindole as known in the art (see for example Loakes, 2001, Nucleic Acids Research, 29, 2437-2447).

[0408] The term “acyclic nucleotide” as used herein refers to any nucleotide having an acyclic ribose sugar, for example where any of the ribose carbons (C1, C2, C3, C4, or C5), are independently or in combination absent from the nucleotide.

[0409] The nucleic acid molecules of the instant invention, individually, or in combination or in conjunction with other drugs, can be used to for preventing or treating diseases, disorders, conditions, and traits described herein or otherwise known in the art, in a subject or organism.

[0410] In one embodiment, the siNA molecules of the invention can be administered to a subject or can be administered to other appropriate cells evident to those skilled in the art, individually or in combination with one or more drugs under conditions suitable for the treatment.

[0411] In a further embodiment, the siNA molecules can be used in combination with other known treatments to prevent or treat respiratory diseases, disorders, or conditions in a subject or organism. For example, the described molecules could be used in combination with one or more known compounds, treatments, or procedures to prevent or treat diseases, disorders, conditions, and traits described herein in a subject or organism as are known in the art.

[0412] In one embodiment, the invention features an expression vector comprising a nucleic acid sequence encoding at least one siNA molecule of the invention, in a manner which allows expression of the siNA molecule. For example, the vector can contain sequence(s) encoding both strands of a siNA molecule comprising a duplex. The vector can also contain sequence(s) encoding a single nucleic acid molecule that is self-complementary and thus forms a siNA molecule. Non-limiting examples of such expression vectors are described in Paul et al., 2002, Nature Biotechnology, 19, 505; Miyagishi and Taira, 2002, Nature Biotechnology, 19, 497; Lee et al., 2002, Nature Biotechnology, 19, 500; and Novina et al., 2002, Nature Medicine, advance online publication doi:10.1038/nm725.

[0413] In another embodiment, the invention features a mammalian cell, for example, a human cell, including an expression vector of the invention.

[0414] In yet another embodiment, the expression vector of the invention comprises a sequence for a siNA molecule having complementarity to a RNA molecule referred to by a Genbank Accession numbers, for example Genbank Accession Nos. shown herein (Table I) or in PCT/US03/05028 and U.S. Ser. No. 10/923,536, both incorporated by reference herein.

[0415] In one embodiment, an expression vector of the invention comprises a nucleic acid sequence encoding two or more siNA molecules, which can be the same or different.

[0416] In another aspect of the invention, siNA molecules that interact with target RNA molecules and down-regulate gene encoding target RNA molecules (for example target RNA molecules referred to by Genbank Accession numbers herein) are expressed from transcription units inserted into DNA or RNA vectors. The recombinant vectors can be DNA plasmids or viral vectors. siNA expressing viral vectors can be constructed based on, but not limited to, adeno-associated virus, retrovirus, adenovirus, or alphavirus. The recombinant vectors capable of expressing the siNA molecules can be delivered as described herein, and persist in target cells. Alternatively, viral vectors can be used that provide for transient expression of siNA molecules. Such vectors can be repeatedly administered as necessary. Once expressed, the siNA molecules bind and down-regulate gene function or expression via RNA interference (RNAi). Delivery of siNA expressing vectors can be systemic, such as by intravenous or intramuscular administration, by administration to target cells ex-planted from a subject followed by reintroduction into the subject, or by any other means that would allow for introduction into the desired target cell.

[0417] By “vectors” is meant any nucleic acid- and/or viral-based technique used to deliver a desired nucleic acid.

[0418] Other features and advantages of the invention will be apparent from the following description of the preferred embodiments thereof, and from the claims.

### BRIEF DESCRIPTION OF THE DRAWINGS

[0419] FIG. 1 shows a non-limiting example of a scheme for the synthesis of siNA molecules. The complementary siNA sequence strands, strand 1 and strand 2, are synthesized in tandem and are connected by a cleavable linkage, such as a nucleotide succinate or abasic succinate, which can be the same or different from the cleavable linker used for solid phase synthesis on a solid support. The synthesis can be either solid phase or solution phase, in the example shown, the synthesis is a solid phase synthesis. The synthesis is performed such that a protecting group, such as a dimethoxytrityl group, remains intact on the terminal nucleotide of the tandem oligonucleotide. Upon cleavage and deprotection of the oligonucleotide, the two siNA strands spontaneously hybridize to form a siNA duplex, which allows the purification of the duplex by utilizing the properties of the terminal protecting group, for example by applying a trityl on purification method wherein only duplexes/oligonucleotides with the terminal protecting group are isolated.

[0420] FIG. 2 shows a MALDI-TOF mass spectrum of a purified siNA duplex synthesized by a method of the invention. The two peaks shown correspond to the predicted mass of the separate siNA sequence strands. This result demonstrates that the siNA duplex generated from tandem synthesis can be purified as a single entity using a simple trityl-on purification methodology.

[0421] FIG. 3 shows a non-limiting proposed mechanistic representation of target RNA degradation involved in RNAi. Double-stranded RNA (dsRNA), which is generated by RNA-dependent RNA polymerase (RdRP) from foreign single-stranded RNA, for example viral, transposon, or other exogenous RNA, activates the DICER enzyme that in turn generates siNA duplexes. Alternately, synthetic or expressed siNA can be introduced directly into a cell by appropriate means. An active siNA complex forms which recognizes a target RNA, resulting in degradation of the target RNA by the RISC endonuclease complex or in the synthesis of additional RNA by RNA-dependent RNA polymerase (RdRP), which can activate DICER and result in additional siNA molecules, thereby amplifying the RNAi response.

[0422] FIG. 4A-F shows non-limiting examples of chemically-modified siNA constructs of the present invention. In the figure, N stands for any nucleotide (adenosine, guanosine, cytosine, uridine, or optionally thymidine, for example thymidine can be substituted in the overhanging regions designated by parenthesis (N N). Various modifications are shown for the sense and antisense strands of the siNA constructs. The (N N) nucleotide positions can be chemically modified as described herein (e.g., 2′-O-methyl, 2′-deoxy-2′-fluoro etc.) and can be either derived from a corresponding target nucleic acid sequence or not (see for example FIG. 6C). Furthermore, the sequences shown in FIG. 4 can optionally include a ribonucleotide at the 9^{th} position from the 5′-end of the sense strand or the 11^{th} position based on the 5′-end of the guide strand by counting 11 nucleotide positions in from the 5′-terminus of the guide strand (see FIG. 6C).

[0423] FIG. 4A: The sense strand comprises 21 nucleotides wherein the two terminal 3′-nucleotides are optionally base paired and wherein all nucleotides present are ribonucleotides except for (N N) nucleotides, which can comprise ribonucleotides, deoxynucleotides, universal bases, or other chemical modifications described herein. The antisense strand comprises 21 nucleotides, optionally having a 3′-terminal glyceryl moiety wherein the two terminal 3′-nucleotides are optionally complementary to the target RNA sequence, and wherein all nucleotides present are ribonucleotides except for (N N) nucleotides, which can comprise ribonucleotides, deoxynucleotides, universal bases, or other chemical modifications described herein. A modified internucleotide linkage, such as a phosphorothioate, phosphorodithioate or other modified internucleotide linkage as described herein, shown as “s”, optionally connects the (N N) nucleotides in the antisense strand.

[0424] FIG. 4B: The sense strand comprises 21 nucleotides wherein the two terminal 3′-nucleotides are optionally base paired and wherein all pyrimidine nucleotides that may be present are 2′deoxy-2′-fluoro modified nucleotides and all purine nucleotides that may be present are 2′-O-methyl modified nucleotides except for (N N) nucleotides, which can comprise ribonucleotides, deoxynucleotides, universal bases, or other chemical modifications described herein. The antisense strand comprises 21 nucleotides, optionally having a 3′-terminal glyceryl moiety and wherein the two terminal 3′-nucleotides are optionally complementary to the target RNA sequence, and wherein all pyrimidine nucleotides that may be present are 2′-deoxy-2′-fluoro modified nucleotides and all purine nucleotides that may be present are 2′-O-methyl modified nucleotides except for (N N) nucleotides, which can comprise ribonucleotides, deoxynucleotides, universal bases, or other chemical modifications described herein. A modified internucleotide linkage, such as a phosphorothioate, phosphorodithioate or other modified internucleotide linkage as described herein, shown as “s”, optionally connects the (N N) nucleotides in the sense and antisense strand.

[0425] FIG. 4C: The sense strand comprises 21 nucleotides having 5′- and 3′-terminal cap moieties wherein the two terminal 3′-nucleotides are optionally base paired and wherein all pyrimidine nucleotides that may be present are 2′-O-methyl or 2′-deoxy-2′-fluoro modified nucleotides except for (N N) nucleotides, which can comprise ribonucleotides, deoxynucleotides, universal bases, or other chemical modifications described herein. The antisense strand comprises 21 nucleotides, optionally having a 3′-terminal glyceryl moiety and wherein the two terminal 3′-nucleotides are optionally complementary to the target RNA sequence, and wherein all pyrimidine nucleotides that may be present are 2′-deoxy-2′-fluoro modified nucleotides except for (N N) nucleotides, which can comprise ribonucleotides, deoxynucleotides, universal bases, or other chemical modifications described herein. A modified internucleotide linkage, such as a phosphorothioate, phosphorodithioate or other modified internucleotide linkage as described herein, shown as “s”, optionally connects the (N N) nucleotides in the antisense strand.

[0426] FIG. 4D: The sense strand comprises 21 nucleotides having 5′- and 3′-terminal cap moieties wherein the two terminal 3′-nucleotides are optionally base paired and wherein all pyrimidine nucleotides that may be present are 2′-deoxy-2′-fluoro modified nucleotides except for (N N) nucleotides, which can comprise ribonucleotides, deoxynucleotides, universal bases, or other chemical modifications described herein and wherein and all purine nucleotides that may be present are 2′-deoxy nucleotides. The antisense strand comprises 21 nucleotides, optionally having a 3′-terminal glyceryl moiety and wherein the two terminal 3′-nucleotides are optionally complementary to the target RNA sequence, wherein all pyrimidine nucleotides that may be present are 2′-deoxy-2′-fluoro modified nucleotides and all purine nucleotides that may be present are 2′-O-methyl modified nucleotides except for (N N) nucleotides, which can comprise ribonucleotides, deoxynucleotides, universal bases, or other chemical modifications described herein. A modified internucleotide linkage, such as a phosphorothioate, phosphorodithioate or other modified internucleotide linkage as described herein, shown as “s”, optionally connects the (N N) nucleotides in the antisense strand.

[0427] FIG. 4E: The sense strand comprises 21 nucleotides having 5′- and 3′-terminal cap moieties wherein the two terminal 3′-nucleotides are optionally base paired and wherein all pyrimidine nucleotides that may be present are 2′-deoxy-2′-fluoro modified nucleotides except for (N N) nucleotides, which can comprise ribonucleotides, deoxynucleotides, universal bases, or other chemical modifications described herein. The antisense strand comprises 21 nucleotides, optionally having a 3′-terminal glyceryl moiety and wherein the two terminal 3′-nucleotides are optionally complementary to the target RNA sequence, and wherein all pyrimidine nucleotides that may be present are 2′-deoxy-2′-fluoro modified nucleotides and all purine nucleotides that may be present are 2′-O-methyl modified nucleotides except for (N N) nucleotides, which can comprise ribonucleotides, deoxynucleotides, universal bases, or other chemical modifications described herein. A modified internucleotide linkage, such as a phosphorothioate, phosphorodithioate or other modified internucleotide linkage as described herein, shown as “s”, optionally connects the (N N) nucleotides in the antisense strand.

[0428] FIG. 4F: The sense strand comprises 21 nucleotides having 5′- and 3′-terminal cap moieties wherein the two terminal 3′-nucleotides are optionally base paired and wherein all pyrimidine nucleotides that may be present are 2′-deoxy-2′-fluoro modified nucleotides except for (N N) nucleotides, which can comprise ribonucleotides, deoxynucleotides, universal bases, or other chemical modifications described herein and wherein and all purine nucleotides that may be present are 2′-deoxy nucleotides. The antisense strand comprises 21 nucleotides, optionally having a 3′-terminal glyceryl moiety and wherein the two terminal 3′-nucleotides are optionally complementary to the target RNA sequence, and having one 3′-terminal phosphorothioate internucleotide linkage and wherein all pyrimidine nucleotides that may be present are 2′-deoxy-2′-fluoro modified nucleotides and all purine nucleotides that may be present are 2′-deoxy nucleotides except for (N N) nucleotides, which can comprise ribonucleotides, deoxynucleotides, universal bases, or other chemical modifications described herein. A modified internucleotide linkage, such as a phosphorothioate, phosphorodithioate or other modified internucleotide linkage as described herein, shown as “s”, optionally connects the (N N) nucleotides in the antisense strand. The antisense strand of constructs A-F comprise sequence complementary to any target nucleic acid sequence of the invention. Furthermore, when a glyceryl moiety (L) is present at the 3′-end of the antisense strand for any construct shown in FIG. 4 A-F, the modified internucleotide linkage is optional.

[0429] FIG. 5A-F shows non-limiting examples of specific chemically-modified siNA sequences of the invention. A-F applies the chemical modifications described in FIG. 4A-F to an exemplary SREBP1 siNA sequence. Such chemical modifications can be applied to any SREBP1 sequence. Furthermore, the sequences shown in FIG. 5 can optionally include a ribonucleotide at the 9^{th} position from the 5′-end of the sense strand or the 11^{th} position based on the 5′-end of the guide strand by counting 11 nucleotide positions in from the 5′-terminus of the guide strand (see FIG. 6C). In addition, the sequences shown in FIG. 5 can optionally include terminal ribonucleotides at up to about 4 positions at the 5′-end of the antisense strand (e.g., about 1, 2, 3, or 4 terminal ribonucleotides at the 5′-end of the antisense strand).

[0430] FIG. 6A-C shows non-limiting examples of different siNA constructs of the invention.

[0431] The examples shown in FIG. 6A (constructs 1, 2, and 3) have 19 representative base pairs; however, different embodiments of the invention include any number of base pairs described herein. Bracketed regions represent nucleotide overhangs, for example, comprising about 1, 2, 3, or 4 nucleotides in length, preferably about 2 nucleotides. Constructs 1 and 2 can be used independently for RNAi activity. Construct 2 can comprise a polynucleotide or non-nucleotide linker, which can optionally be designed as a biodegradable linker. In one embodiment, the loop structure shown in construct 2 can comprise a biodegradable linker that results in the formation of construct 1 in vivo and/or in vitro. In another example, construct 3 can be used to generate construct 2 under the same principle wherein a linker is used to generate the active siNA construct 2 in vivo and/or in vitro, which can optionally utilize another biodegradable linker to generate the active siNA construct 1 in vivo and/or in vitro. As such, the stability and/or activity of the siNA constructs can be modulated based on the design of the siNA construct for use in vivo or in vitro and/or in vitro.

[0432] The examples shown in FIG. 6B represent different variations of double stranded nucleic acid molecule of the invention, such as microRNA, that can include overhangs, bulges, loops, and stem-loops resulting from partial complementarity. Such motifs having bulges, loops, and stem-loops are generally characteristics of miRNA. The bulges, loops, and stem-loops can result from any degree of partial complementarity, such as mismatches or bulges of about 1, 2, 3, 4, 5, 6, 7, 8, 9, 10 or more nucleotides in one or both strands of the double stranded nucleic acid molecule of the invention.

[0433] The example shown in FIG. 6C represents a model double stranded nucleic acid molecule of the invention comprising a 19 base pair duplex of two 21 nucleotide sequences having dinucleotide 3′-overhangs. The top strand (1) represents the sense strand (passenger strand), the middle strand (2) represents the antisense (guide strand), and the lower strand (3) represents a target polynucleotide sequence. The dinucleotide overhangs (NN) can comprise sequence derived from the target polynucleotide. For example, the 3′-(NN) sequence in the guide strand can be complementary to the 5′-[NN] sequence of the target polynucleotide. In addition, the 5′-(NN) sequence of the passenger strand can comprise the same sequence as the 5′-[NN] sequence of the target polynucleotide sequence. In other embodiments, the overhangs (NN) are not derived from the target polynucleotide sequence, for example where the 3′-(NN) sequence in the guide strand are not complementary to the 5′-[NN] sequence of the target polynucleotide and the 5′-(NN) sequence of the passenger strand can comprise different sequence from the 5′-[NN] sequence of the target polynucleotide sequence. In additional embodiments, any (NN) nucleotides are chemically modified, e.g., as 2′-O-methyl, 2′-deoxy-2′-fluoro, and/or other modifications herein. Furthermore, the passenger strand can comprise a ribonucleotide position N of the passenger strand. For the representative 19 base pair 21 mer duplex shown, position N can be 9 nucleotides in from the 3′ end of the passenger strand. However, in duplexes of differing length, the position N is determined based on the 5′-end of the guide strand by counting 11 nucleotide positions in from the 5′-terminus of the guide strand and picking the corresponding base paired nucleotide in the passenger strand. Cleavage by Ago2 takes place between positions 10 and 11 as indicated by the arrow. In additional embodiments, there are two ribonucleotides, NN, at positions 10 and 11 based on the 5′-end of the guide strand by counting 10 and 11 nucleotide positions in from the 5′-terminus of the guide strand and picking the corresponding base paired nucleotides in the passenger strand.

[0434] FIG. 7A-C is a diagrammatic representation of a scheme utilized in generating an expression cassette to generate siNA hairpin constructs.

[0435] FIG. 7A: A DNA oligomer is synthesized with a 5′-restriction site (R1) sequence followed by a region having sequence identical (sense region of siNA) to a predetermined target sequence, wherein the sense region comprises, for example, about 19, 20, 21, or 22 nucleotides (N) in length, which is followed by a loop sequence of defined sequence (X), comprising, for example, about 3 to about 10 nucleotides.

[0436] FIG. 7B: The synthetic construct is then extended by DNA polymerase to generate a hairpin structure having self-complementary sequence that will result in a siNA transcript having specificity for a target sequence and having self-complementary sense and antisense regions.

[0437] FIG. 7C: The construct is heated (for example to about 95° C.) to linearize the sequence, thus allowing extension of a complementary second DNA strand using a primer to the 3′-restriction sequence of the first strand. The double-stranded DNA is then inserted into an appropriate vector for expression in cells. The construct can be designed such that a 3′-terminal nucleotide overhang results from the transcription, for example, by engineering restriction sites and/or utilizing a poly-U termination region as described in Paul et al., 2002, Nature Biotechnology, 29, 505-508.

[0438] FIG. 8A-C is a diagrammatic representation of a scheme utilized in generating an expression cassette to generate double-stranded siNA constructs.

[0439] FIG. 8A: A DNA oligomer is synthesized with a 5′-restriction (R1) site sequence followed by a region having sequence identical (sense region of siNA) to a predetermined target sequence, wherein the sense region comprises, for example, about 19, 20, 21, or 22 nucleotides (N) in length, and which is followed by a 3′-restriction site (R2) which is adjacent to a loop sequence of defined sequence (X).

[0440] FIG. 8B: The synthetic construct is then extended by DNA polymerase to generate a hairpin structure having self-complementary sequence.

[0441] FIG. 8C: The construct is processed by restriction enzymes specific to R1 and R2 to generate a double-stranded DNA which is then inserted into an appropriate vector for expression in cells. The transcription cassette is designed such that a U6 promoter region flanks each side of the dsDNA which generates the separate sense and antisense strands of the siNA. Poly T termination sequences can be added to the constructs to generate U overhangs in the resulting transcript.

[0442] FIG. 9A-E is a diagrammatic representation of a method used to determine target sites for siNA mediated RNAi within a particular target nucleic acid sequence, such as messenger RNA.

[0443] FIG. 9A: A pool of siNA oligonucleotides are synthesized wherein the antisense region of the siNA constructs has complementarity to target sites across the target nucleic acid sequence, and wherein the sense region comprises sequence complementary to the antisense region of the siNA.

[0444] FIGS. 9B&C: (FIG. 9B) The sequences are pooled and are inserted into vectors such that (FIG. 9C) transfection of a vector into cells results in the expression of the siNA.

[0445] FIG. 9D: Cells are sorted based on phenotypic change that is associated with modulation of the target nucleic acid sequence.

[0446] FIG. 9E: The siNA is isolated from the sorted cells and is sequenced to identify efficacious target sites within the target nucleic acid sequence.

[0447] FIG. 10 shows non-limiting examples of different stabilization chemistries (1-10) that can be used, for example, to stabilize the 3′-end of siNA sequences of the invention, including (1) [3-3′]-inverted deoxyribose; (2) deoxyribonucleotide; (3) [5′-3′]-3′-deoxyribonucleotide; (4) [5′-3′]-ribonucleotide; (5) [5′-3′]-3′-O-methyl ribonucleotide; (6) 3′-glyceryl; (7) [3′-5′]-3′-deoxyribonucleotide; (8) [3′-3′]-deoxyribonucleotide; (9) [5′-2′]-deoxyribonucleotide; and (10) [5-3′]-dideoxyribonucleotide. In addition to modified and unmodified backbone chemistries indicated in the figure, these chemistries can be combined with different backbone modifications as described herein, for example, backbone modifications having Formula I. In addition, the 2′-deoxy nucleotide shown 5′ to the terminal modifications shown can be another modified or unmodified nucleotide or non-nucleotide described herein, for example modifications having any of Formulae I-VII or any combination thereof.

[0448] FIG. 11 shows a non-limiting example of a strategy used to identify chemically modified siNA constructs of the invention that are nuclease resistant while preserving the ability to mediate RNAi activity. Chemical modifications are introduced into the siNA construct based on educated design parameters (e.g. introducing 2′-modifications, base modifications, backbone modifications, terminal cap modifications etc). The modified construct in tested in an appropriate system (e.g. human serum for nuclease resistance, shown, or an animal model for PK/delivery parameters). In parallel, the siNA construct is tested for RNAi activity, for example in a cell culture system such as a luciferase reporter assay). Lead siNA constructs are then identified which possess a particular characteristic while maintaining RNAi activity, and can be further modified and assayed once again. This same approach can be used to identify siNA-conjugate molecules with improved pharmacokinetic profiles, delivery, and RNAi activity.

[0449] FIG. 12 shows non-limiting examples of phosphorylated siNA molecules of the invention, including linear and duplex constructs and asymmetric derivatives thereof.

[0450] FIG. 13 shows non-limiting examples of chemically modified terminal phosphate groups of the invention.

[0451] FIG. 14A shows a non-limiting example of methodology used to design self complementary DFO constructs utilizing palindrome and/or repeat nucleic acid sequences that are identified in a target nucleic acid sequence. (i) A palindrome or repeat sequence is identified in a nucleic acid target sequence. (ii) A sequence is designed that is complementary to the target nucleic acid sequence and the palindrome sequence. (iii) An inverse repeat sequence of the non-palindrome/repeat portion of the complementary sequence is appended to the 3′-end of the complementary sequence to generate a self complementary DFO molecule comprising sequence complementary to the nucleic acid target. (iv) The DFO molecule can self-assemble to form a double stranded oligonucleotide. FIG. 14B shows a non-limiting representative example of a duplex forming oligonucleotide sequence. FIG. 14C shows a non-limiting example of the self assembly schematic of a representative duplex forming oligonucleotide sequence. FIG. 14D shows a non-limiting example of the self assembly schematic of a representative duplex forming oligonucleotide sequence followed by interaction with a target nucleic acid sequence resulting in modulation of gene expression.

[0452] FIG. 15 shows a non-limiting example of the design of self complementary DFO constructs utilizing palindrome and/or repeat nucleic acid sequences that are incorporated into the DFO constructs that have sequence complementary to any target nucleic acid sequence of interest. Incorporation of these palindrome/repeat sequences allow the design of DFO constructs that form duplexes in which each strand is capable of mediating modulation of target gene expression, for example by RNAi. First, the target sequence is identified. A complementary sequence is then generated in which nucleotide or non-nucleotide modifications (shown as X or Y) are introduced into the complementary sequence that generate an artificial palindrome (shown as XYXYXY in the Figure). An inverse repeat of the non-palindrome/repeat complementary sequence is appended to the 3′-end of the complementary sequence to generate a self complementary DFO comprising sequence complementary to the nucleic acid target. The DFO can self-assemble to form a double stranded oligonucleotide.

[0453] FIG. 16 shows non-limiting examples of multifunctional siNA molecules of the invention comprising two separate polynucleotide sequences that are each capable of mediating RNAi directed cleavage of differing target nucleic acid sequences. FIG. 16A shows a non-limiting example of a multifunctional siNA molecule having a first region that is complementary to a first target nucleic acid sequence (complementary region 1) and a second region that is complementary to a second target nucleic acid sequence (complementary region 2), wherein the first and second complementary regions are situated at the 3′-ends of each polynucleotide sequence in the multifunctional siNA. The dashed portions of each polynucleotide sequence of the multifunctional siNA construct have complementarity with regard to corresponding portions of the siNA duplex, but do not have complementarity to the target nucleic acid sequences. FIG. 16B shows a non-limiting example of a multifunctional siNA molecule having a first region that is complementary to a first target nucleic acid sequence (complementary region 1) and a second region that is complementary to a second target nucleic acid sequence (complementary region 2), wherein the first and second complementary regions are situated at the 5′-ends of each polynucleotide sequence in the multifunctional siNA. The dashed portions of each polynucleotide sequence of the multifunctional siNA construct have complementarity with regard to corresponding portions of the siNA duplex, but do not have complementarity to the target nucleic acid sequences.

[0454] FIG. 17 shows non-limiting examples of multifunctional siNA molecules of the invention comprising a single polynucleotide sequence comprising distinct regions that are each capable of mediating RNAi directed cleavage of differing target nucleic acid sequences. FIG. 17A shows a non-limiting example of a multifunctional siNA molecule having a first region that is complementary to a first target nucleic acid sequence (complementary region 1) and a second region that is complementary to a second target nucleic acid sequence (complementary region 2), wherein the second complementary region is situated at the 3′-end of the polynucleotide sequence in the multifunctional siNA. The dashed portions of each polynucleotide sequence of the multifunctional siNA construct have complementarity with regard to corresponding portions of the siNA duplex, but do not have complementarity to the target nucleic acid sequences. FIG. 17B shows a non-limiting example of a multifunctional siNA molecule having a first region that is complementary to a first target nucleic acid sequence (complementary region 1) and a second region that is complementary to a second target nucleic acid sequence (complementary region 2), wherein the first complementary region is situated at the 5′-end of the polynucleotide sequence in the multifunctional siNA. The dashed portions of each polynucleotide sequence of the multifunctional siNA construct have complementarity with regard to corresponding portions of the siNA duplex, but do not have complementarity to the target nucleic acid sequences. In one embodiment, these multifunctional siNA constructs are processed in vivo or in vitro to generate multifunctional siNA constructs as shown in FIG. 16.

[0455] FIG. 18 shows non-limiting examples of multifunctional siNA molecules of the invention comprising two separate polynucleotide sequences that are each capable of mediating RNAi directed cleavage of differing target nucleic acid sequences and wherein the multifunctional siNA construct further comprises a self complementary, palindrome, or repeat region, thus enabling shorter bifunctional siNA constructs that can mediate RNA interference against differing target nucleic acid sequences. FIG. 18A shows a non-limiting example of a multifunctional siNA molecule having a first region that is complementary to a first target nucleic acid sequence (complementary region 1) and a second region that is complementary to a second target nucleic acid sequence (complementary region 2), wherein the first and second complementary regions are situated at the 3′-ends of each polynucleotide sequence in the multifunctional siNA, and wherein the first and second complementary regions further comprise a self complementary, palindrome, or repeat region. The dashed portions of each polynucleotide sequence of the multifunctional siNA construct have complementarity with regard to corresponding portions of the siNA duplex, but do not have complementarity to the target nucleic acid sequences. FIG. 18B shows a non-limiting example of a multifunctional siNA molecule having a first region that is complementary to a first target nucleic acid sequence (complementary region 1) and a second region that is complementary to a second target nucleic acid sequence (complementary region 2), wherein the first and second complementary regions are situated at the 5′-ends of each polynucleotide sequence in the multifunctional siNA, and wherein the first and second complementary regions further comprise a self complementary, palindrome, or repeat region. The dashed portions of each polynucleotide sequence of the multifunctional siNA construct have complementarity with regard to corresponding portions of the siNA duplex, but do not have complementarity to the target nucleic acid sequences.

[0456] FIG. 19 shows non-limiting examples of multifunctional siNA molecules of the invention comprising a single polynucleotide sequence comprising distinct regions that are each capable of mediating RNAi directed cleavage of differing target nucleic acid sequences and wherein the multifunctional siNA construct further comprises a self complementary, palindrome, or repeat region, thus enabling shorter bifunctional siNA constructs that can mediate RNA interference against differing target nucleic acid sequences. FIG. 19A shows a non-limiting example of a multifunctional siNA molecule having a first region that is complementary to a first target nucleic acid sequence (complementary region 1) and a second region that is complementary to a second target nucleic acid sequence (complementary region 2), wherein the second complementary region is situated at the 3′-end of the polynucleotide sequence in the multifunctional siNA, and wherein the first and second complementary regions further comprise a self complementary, palindrome, or repeat region. The dashed portions of each polynucleotide sequence of the multifunctional siNA construct have complementarity with regard to corresponding portions of the siNA duplex, but do not have complementarity to the target nucleic acid sequences. FIG. 19B shows a non-limiting example of a multifunctional siNA molecule having a first region that is complementary to a first target nucleic acid sequence (complementary region 1) and a second region that is complementary to a second target nucleic acid sequence (complementary region 2), wherein the first complementary region is situated at the 5′-end of the polynucleotide sequence in the multifunctional siNA, and wherein the first and second complementary regions further comprise a self complementary, palindrome, or repeat region. The dashed portions of each polynucleotide sequence of the multifunctional siNA construct have complementarity with regard to corresponding portions of the siNA duplex, but do not have complementarity to the target nucleic acid sequences. In one embodiment, these multifunctional siNA constructs are processed in vivo or in vitro to generate multifunctional siNA constructs as shown in FIG. 18.

[0457] FIG. 20 shows a non-limiting example of how multifunctional siNA molecules of the invention can target two separate target nucleic acid molecules, such as separate RNA molecules encoding differing proteins (e.g., any of SREBP1 targets herein), for example, a cytokine and its corresponding receptor, differing viral strains, a virus and a cellular protein involved in viral infection or replication, or differing proteins involved in a common or divergent biologic pathway that is implicated in the maintenance of progression of disease. Each strand of the multifunctional siNA construct comprises a region having complementarity to separate target nucleic acid molecules. The multifunctional siNA molecule is designed such that each strand of the siNA can be utilized by the RISC complex to initiate RNA interference mediated cleavage of its corresponding target. These design parameters can include destabilization of each end of the siNA construct (see for example Schwarz et al., 2003, Cell, 115, 199-208). Such destabilization can be accomplished for example by using guanosine-cytidine base pairs, alternate base pairs (e.g., wobbles), or destabilizing chemically modified nucleotides at terminal nucleotide positions as is known in the art.

[0458] FIG. 21 shows a non-limiting example of how multifunctional siNA molecules of the invention can target two separate target nucleic acid sequences within the same target nucleic acid molecule, such as alternate coding regions of a RNA, coding and non-coding regions of a RNA, or alternate splice variant regions of a RNA. Each strand of the multifunctional siNA construct comprises a region having complementarity to the separate regions of the target nucleic acid molecule. The multifunctional siNA molecule is designed such that each strand of the siNA can be utilized by the RISC complex to initiate RNA interference mediated cleavage of its corresponding target region. These design parameters can include destabilization of each end of the siNA construct (see for example Schwarz et al., 2003, Cell, 115, 199-208). Such destabilization can be accomplished for example by using guanosine-cytidine base pairs, alternate base pairs (e.g., wobbles), or destabilizing chemically modified nucleotides at terminal nucleotide positions as is known in the art.

[0459] FIG. 22(A-H) shows non-limiting examples of tethered multifunctional siNA constructs of the invention. In the examples shown, a linker (e.g., nucleotide or non-nucleotide linker) connects two siNA regions (e.g., two sense, two antisense, or alternately a sense and an antisense region together. Separate sense (or sense and antisense) sequences corresponding to a first target sequence and second target sequence are hybridized to their corresponding sense and/or antisense sequences in the multifunctional siNA. In addition, various conjugates, ligands, aptamers, polymers or reporter molecules can be attached to the linker region for selective or improved delivery and/or pharmacokinetic properties.

[0460] FIG. 23 shows a non-limiting example of various dendrimer based multifunctional siNA designs.

[0461] FIG. 24 shows a non-limiting example of various supramolecular multifunctional siNA designs.

[0462] FIG. 25 shows a non-limiting example of a dicer enabled multifunctional siNA design using a 30 nucleotide precursor siNA construct. A 30 base pair duplex is cleaved by Dicer into 22 and 8 base pair products from either end (8 b.p. fragments not shown). For ease of presentation the overhangs generated by dicer are not shown—but can be compensated for. Three targeting sequences are shown. The required sequence identity overlapped is indicated by grey boxes. The N's of the parent 30 b.p. siNA are suggested sites of 2′-OH positions to enable Dicer cleavage if this is tested in stabilized chemistries. Note that processing of a 30mer duplex by Dicer RNase III does not give a precise 22+8 cleavage, but rather produces a series of closely related products (with 22+8 being the primary site). Therefore, processing by Dicer will yield a series of active siNAs.

[0463] FIG. 26 shows a non-limiting example of a dicer enabled multifunctional siNA design using a 40 nucleotide precursor siNA construct. A 40 base pair duplex is cleaved by Dicer into 20 base pair products from either end. For ease of presentation the overhangs generated by dicer are not shown—but can be compensated for. Four targeting sequences are shown. The target sequences having homology are enclosed by boxes. This design format can be extended to larger RNAs. If chemically stabilized siNAs are bound by Dicer, then strategically located ribonucleotide linkages can enable designer cleavage products that permit our more extensive repertoire of multifunctional designs. For example cleavage products not limited to the Dicer standard of approximately 22-nucleotides can allow multifunctional siNA constructs with a target sequence identity overlap ranging from, for example, about 3 to about 15 nucleotides.

[0464] FIG. 27 shows a non-limiting example of additional multifunctional siNA construct designs of the invention. In one example, a conjugate, ligand, aptamer, label, or other moiety is attached to a region of the multifunctional siNA to enable improved delivery or pharmacokinetic profiling.

[0465] FIG. 28 shows a non-limiting example of additional multifunctional siNA construct designs of the invention. In one example, a conjugate, ligand, aptamer, label, or other moiety is attached to a region of the multifunctional siNA to enable improved delivery or pharmacokinetic profiling.

[0466] FIG. 29 shows a non-limiting example of a cholesterol linked phosphoramidite that can be used to synthesize cholesterol conjugated siNA molecules of the invention. An example is shown with the cholesterol moiety linked to the 5′-end of the sense strand of a siNA molecule.

### DETAILED DESCRIPTION OF THE INVENTION

### Mechanism of Action of Nucleic Acid Molecules of the Invention

[0467] The discussion that follows discusses the proposed mechanism of RNA interference mediated by short interfering RNA as is presently known, and is not meant to be limiting and is not an admission of prior art. Applicant demonstrates herein that chemically-modified short interfering nucleic acids possess similar or improved capacity to mediate RNAi as do siRNA molecules and are expected to possess improved stability and activity in vivo; therefore, this discussion is not meant to be limiting only to siRNA and can be applied to siNA as a whole. By “improved capacity to mediate RNAi” or “improved RNAi activity” is meant to include RNAi activity measured in vitro and/or in vivo where the RNAi activity is a reflection of both the ability of the siNA to mediate RNAi and the stability of the siNAs of the invention. In this invention, the product of these activities can be increased in vitro and/or in vivo compared to an all RNA siRNA or a siNA containing a plurality of ribonucleotides. In some cases, the activity or stability of the siNA molecule can be decreased (i.e., less than ten-fold), but the overall activity of the siNA molecule is enhanced in vitro and/or in vivo.

[0468] RNA interference refers to the process of sequence specific post-transcriptional gene silencing in animals mediated by short interfering RNAs (siRNAs) (Fire et al., 1998, Nature, 391, 806). The corresponding process in plants is commonly referred to as post-transcriptional gene silencing or RNA silencing and is also referred to as quelling in fungi. The process of post-transcriptional gene silencing is thought to be an evolutionarily-conserved cellular defense mechanism used to prevent the expression of foreign genes which is commonly shared by diverse flora and phyla (Fire et al., 1999, Trends Genet., 15, 358). Such protection from foreign gene expression may have evolved in response to the production of double-stranded RNAs (dsRNAs) derived from viral infection or the random integration of transposon elements into a host genome via a cellular response that specifically destroys homologous single-stranded RNA or viral genomic RNA. The presence of dsRNA in cells triggers the RNAi response though a mechanism that has yet to be fully characterized. This mechanism appears to be different from the interferon response that results from dsRNA-mediated activation of protein kinase PKR and 2′,5′-oligoadenylate synthetase resulting in non-specific cleavage of mRNA by ribonuclease L.

[0469] The presence of long dsRNAs in cells stimulates the activity of a ribonuclease III enzyme referred to as Dicer. Dicer is involved in the processing of the dsRNA into short pieces of dsRNA known as short interfering RNAs (siRNAs) (Berstein et al., 2001, Nature, 409, 363). Short interfering RNAs derived from Dicer activity are typically about 21 to about 23 nucleotides in length and comprise about 19 base pair duplexes. Dicer has also been implicated in the excision of 21- and 22-nucleotide small temporal RNAs (stRNAs) from precursor RNA of conserved structure that are implicated in translational control (Hutvagner et al., 2001, Science, 293, 834). The RNAi response also features an endonuclease complex containing a siRNA, commonly referred to as an RNA-induced silencing complex (RISC), which mediates cleavage of single-stranded RNA having sequence homologous to the siRNA. Cleavage of the target RNA takes place in the middle of the region complementary to the guide sequence of the siRNA duplex (Elbashir et al., 2001, Genes Dev., 15, 188). In addition, RNA interference can also involve small RNA (e.g., micro-RNA or miRNA) mediated gene silencing, presumably though cellular mechanisms that regulate chromatin structure and thereby prevent transcription of target gene sequences (see for example Allshire, 2002, Science, 297, 1818-1819; Volpe et al., 2002, Science, 297, 1833-1837; Jenuwein, 2002, Science, 297, 2215-2218; and Hall et al., 2002, Science, 297, 2232-2237). As such, siNA molecules of the invention can be used to mediate gene silencing via interaction with RNA transcripts or alternately by interaction with particular gene sequences, wherein such interaction results in gene silencing either at the transcriptional level or post-transcriptional level.

[0470] RNAi has been studied in a variety of systems. Fire et al., 1998, Nature, 391, 806, were the first to observe RNAi in C. elegans. Wianny and Goetz, 1999, Nature Cell Biol., 2, 70, describe RNAi mediated by dsRNA in mouse embryos. Hammond et al., 2000, Nature, 404, 293, describe RNAi in Drosophila cells transfected with dsRNA. Elbashir et al., 2001, Nature, 411, 494, describe RNAi induced by introduction of duplexes of synthetic 21-nucleotide RNAs in cultured mammalian cells including human embryonic kidney and HeLa cells. Recent work in Drosophila embryonic lysates has revealed certain requirements for siRNA length, structure, chemical composition, and sequence that are essential to mediate efficient RNAi activity. These studies have shown that 21 nucleotide siRNA duplexes are most active when containing two 2-nucleotide 3′-terminal nucleotide overhangs. Furthermore, substitution of one or both siRNA strands with 2′-deoxy or 2′-O-methyl nucleotides abolishes RNAi activity, whereas substitution of 3′-terminal siRNA nucleotides with deoxy nucleotides was shown to be tolerated. Mismatch sequences in the center of the siRNA duplex were also shown to abolish RNAi activity. In addition, these studies also indicate that the position of the cleavage site in the target RNA is defined by the 5′-end of the siRNA guide sequence rather than the 3′-end (Elbashir et al., 2001, EMBO J., 20, 6877). Other studies have indicated that a 5′-phosphate on the target-complementary strand of a siRNA duplex is required for siRNA activity and that ATP is utilized to maintain the 5′-phosphate moiety on the siRNA (Nykanen et al., 2001, Cell, 107, 309); however, siRNA molecules lacking a 5′-phosphate are active when introduced exogenously, suggesting that 5′-phosphorylation of siRNA constructs may occur in vivo.

### Duplex Forming Oligonucleotides (DFO) of the Invention

[0471] In one embodiment, the invention features siNA molecules comprising duplex forming oligonucleotides (DFO) that can self-assemble into double stranded oligonucleotides. The duplex forming oligonucleotides of the invention can be chemically synthesized or expressed from transcription units and/or vectors. The DFO molecules of the instant invention provide useful reagents and methods for a variety of therapeutic, diagnostic, agricultural, veterinary, target validation, genomic discovery, genetic engineering and pharmacogenomic applications.

[0472] Applicant demonstrates herein that certain oligonucleotides, referred to herein for convenience but not limitation as duplex forming oligonucleotides or DFO molecules, are potent mediators of sequence specific regulation of gene expression. The oligonucleotides of the invention are distinct from other nucleic acid sequences known in the art (e.g., siRNA, miRNA, stRNA, shRNA, antisense oligonucleotides etc.) in that they represent a class of linear polynucleotide sequences that are designed to self-assemble into double stranded oligonucleotides, where each strand in the double stranded oligonucleotides comprises a nucleotide sequence that is complementary to a SREBP1 target nucleic acid molecule. Nucleic acid molecules of the invention can thus self assemble into functional duplexes in which each strand of the duplex comprises the same polynucleotide sequence and each strand comprises a nucleotide sequence that is complementary to a SREBP1 target nucleic acid molecule.

[0473] Generally, double stranded oligonucleotides are formed by the assembly of two distinct oligonucleotide sequences where the oligonucleotide sequence of one strand is complementary to the oligonucleotide sequence of the second strand; such double stranded oligonucleotides are assembled from two separate oligonucleotides, or from a single molecule that folds on itself to form a double stranded structure, often referred to in the field as hairpin stem-loop structure (e.g., shRNA or short hairpin RNA). These double stranded oligonucleotides known in the art all have a common feature in that each strand of the duplex has a distinct nucleotide sequence.

[0474] Distinct from the double stranded nucleic acid molecules known in the art, the applicants have developed a novel, potentially cost effective and simplified method of forming a double stranded nucleic acid molecule starting from a single stranded or linear oligonucleotide. The two strands of the double stranded oligonucleotide formed according to the instant invention have the same nucleotide sequence and are not covalently linked to each other. Such double-stranded oligonucleotides molecules can be readily linked post-synthetically by methods and reagents known in the art and are within the scope of the invention. In one embodiment, the single stranded oligonucleotide of the invention (the duplex forming oligonucleotide) that forms a double stranded oligonucleotide comprises a first region and a second region, where the second region includes a nucleotide sequence that is an inverted repeat of the nucleotide sequence in the first region, or a portion thereof, such that the single stranded oligonucleotide self assembles to form a duplex oligonucleotide in which the nucleotide sequence of one strand of the duplex is the same as the nucleotide sequence of the second strand. Non-limiting examples of such duplex forming oligonucleotides are illustrated in FIGS. 14 and 15. These duplex forming oligonucleotides (DFOs) can optionally include certain palindrome or repeat sequences where such palindrome or repeat sequences are present in between the first region and the second region of the DFO.

[0475] In one embodiment, the invention features a duplex forming oligonucleotide (DFO) molecule, wherein the DFO comprises a duplex forming self complementary nucleic acid sequence that has nucleotide sequence complementary to a SREBP1 target nucleic acid sequence. The DFO molecule can comprise a single self complementary sequence or a duplex resulting from assembly of such self complementary sequences.

[0476] In one embodiment, a duplex forming oligonucleotide (DFO) of the invention comprises a first region and a second region, wherein the second region comprises a nucleotide sequence comprising an inverted repeat of nucleotide sequence of the first region such that the DFO molecule can assemble into a double stranded oligonucleotide. Such double stranded oligonucleotides can act as a short interfering nucleic acid (siNA) to modulate gene expression. Each strand of the double stranded oligonucleotide duplex formed by DFO molecules of the invention can comprise a nucleotide sequence region that is complementary to the same nucleotide sequence in a SREBP1 target nucleic acid molecule (e.g., SREBP1 target RNA).

[0477] In one embodiment, the invention features a single stranded DFO that can assemble into a double stranded oligonucleotide. The applicant has surprisingly found that a single stranded oligonucleotide with nucleotide regions of self complementarity can readily assemble into duplex oligonucleotide constructs. Such DFOs can assemble into duplexes that can inhibit gene expression in a sequence specific manner. The DFO molecules of the invention comprise a first region with nucleotide sequence that is complementary to the nucleotide sequence of a second region and where the sequence of the first region is complementary to a SREBP1 target nucleic acid (e.g., RNA). The DFO can form a double stranded oligonucleotide wherein a portion of each strand of the double stranded oligonucleotide comprises a sequence complementary to a SREBP1 target nucleic acid sequence.

[0478] In one embodiment, the invention features a double stranded oligonucleotide, wherein the two strands of the double stranded oligonucleotide are not covalently linked to each other, and wherein each strand of the double stranded oligonucleotide comprises a nucleotide sequence that is complementary to the same nucleotide sequence in a SREBP1 target nucleic acid molecule or a portion thereof (e.g., SREBP1 RNA target). In another embodiment, the two strands of the double stranded oligonucleotide share an identical nucleotide sequence of at least about 15, preferably at least about 16, 17, 18, 19, 20, or 21 nucleotides.

[0479] In one embodiment, a DFO molecule of the invention comprises a structure having Formula DFO-I:

5′-p-XZX′-3′

wherein Z comprises a palindromic or repeat nucleic acid sequence optionally with one or more modified nucleotides (e.g., nucleotide with a modified base, such as 2-amino purine, 2-amino-1,6-dihydro purine or a universal base), for example of length about 2 to about 24 nucleotides in even numbers (e.g., about 2, 4, 6, 8, 10, 12, 14, 16, 18, 20, or 22 or 24 nucleotides), X represents a nucleic acid sequence, for example of length of about 1 to about 21 nucleotides (e.g., about 1, 2, 3, 4, 5, 6, 7, 8, 9, 10, 11, 12, 13, 14, 15, 16, 17, 18, 19, 20, or 21 nucleotides), X′ comprises a nucleic acid sequence, for example of length about 1 and about 21 nucleotides (e.g., about 1, 2, 3, 4, 5, 6, 7, 8, 9, 10, 11, 12, 13, 14, 15, 16, 17, 18, 19, or 21 nucleotides) having nucleotide sequence complementarity to sequence X or a portion thereof, p comprises a terminal phosphate group that can be present or absent, and wherein sequence X and Z, either independently or together, comprise nucleotide sequence that is complementary to a SREBP1 target nucleic acid sequence or a portion thereof and is of length sufficient to interact (e.g., base pair) with the SREBP1 target nucleic acid sequence or a portion thereof (e.g., SREBP1 RNA target). For example, X independently can comprise a sequence from about 12 to about 21 or more (e.g., about 12, 13, 14, 15, 16, 17, 18, 19, 20, 21, or more) nucleotides in length that is complementary to nucleotide sequence in a SREBP1 target RNA or a portion thereof. In another non-limiting example, the length of the nucleotide sequence of X and Z together, when X is present, that is complementary to the SREBP1 target or a portion thereof (e.g., SREBP1 RNA target) is from about 12 to about 21 or more nucleotides (e.g., about 12, 13, 14, 15, 16, 17, 18, 19, 20, 21, or more). In yet another non-limiting example, when X is absent, the length of the nucleotide sequence of Z that is complementary to the SREBP1 target or a portion thereof is from about 12 to about 24 or more nucleotides (e.g., about 12, 14, 16, 18, 20, 22, 24, or more). In one embodiment X, Z and X′ are independently oligonucleotides, where X and/or Z comprises a nucleotide sequence of length sufficient to interact (e.g., base pair) with a nucleotide sequence in the SREBP1 target or a portion thereof (e.g., SREBP1 RNA target). In one embodiment, the lengths of oligonucleotides X and X′ are identical. In another embodiment, the lengths of oligonucleotides X and X′ are not identical. In another embodiment, the lengths of oligonucleotides X and Z, or Z and X′, or X, Z and X′ are either identical or different.

[0480] When a sequence is described in this specification as being of “sufficient” length to interact (i.e., base pair) with another sequence, it is meant that the length is such that the number of bonds (e.g., hydrogen bonds) formed between the two sequences is enough to enable the two sequence to form a duplex under the conditions of interest. Such conditions can be in vitro (e.g., for diagnostic or assay purposes) or in vivo (e.g., for therapeutic purposes). It is a simple and routine matter to determine such lengths.

[0481] In one embodiment, the invention features a double stranded oligonucleotide construct having Formula DFO-I(a):

5′-p-XZX′-3′

3′-X′ZX-p-5′

wherein Z comprises a palindromic or repeat nucleic acid sequence or palindromic or repeat-like nucleic acid sequence with one or more modified nucleotides (e.g., nucleotides with a modified base, such as 2-amino purine, 2-amino-1,6-dihydro purine or a universal base), for example of length about 2 to about 24 nucleotides in even numbers (e.g., about 2, 4, 6, 8, 10, 12, 14, 16, 18, 20, 22 or 24 nucleotides), X represents a nucleic acid sequence, for example of length about 1 to about 21 nucleotides (e.g., about 1, 2, 3, 4, 5, 6, 7, 8, 9, 10, 11, 12, 13, 14, 15, 16, 17, 18, 19, 20, or 21 nucleotides), X′ comprises a nucleic acid sequence, for example of length about 1 to about 21 nucleotides (e.g., about 1, 2, 3, 4, 5, 6, 7, 8, 9, 10, 11, 12, 13, 14, 15, 16, 17, 18, 19, 20 or 21 nucleotides) having nucleotide sequence complementarity to sequence X or a portion thereof, p comprises a terminal phosphate group that can be present or absent, and wherein each X and Z independently comprises a nucleotide sequence that is complementary to a SREBP1 target nucleic acid sequence or a portion thereof (e.g., SREBP1 RNA target) and is of length sufficient to interact with the SREBP1 target nucleic acid sequence of a portion thereof (e.g., SREBP1 RNA target). For example, sequence X independently can comprise a sequence from about 12 to about 21 or more nucleotides (e.g., about 12, 13, 14, 15, 16, 17, 18, 19, 20, 21, or more) in length that is complementary to a nucleotide sequence in a SREBP1 target or a portion thereof (e.g., SREBP1 RNA target). In another non-limiting example, the length of the nucleotide sequence of X and Z together (when X is present) that is complementary to the SREBP1 target or a portion thereof is from about 12 to about 21 or more nucleotides (e.g., about 12, 13, 14, 15, 16, 17, 18, 19, 20, 21, or more). In yet another non-limiting example, when X is absent, the length of the nucleotide sequence of Z that is complementary to the SREBP1 target or a portion thereof is from about 12 to about 24 or more nucleotides (e.g., about 12, 14, 16, 18, 20, 22, 24 or more). In one embodiment X, Z and X′ are independently oligonucleotides, where X and/or Z comprises a nucleotide sequence of length sufficient to interact (e.g., base pair) with nucleotide sequence in the SREBP1 target or a portion thereof (e.g., SREBP1 RNA target). In one embodiment, the lengths of oligonucleotides X and X′ are identical. In another embodiment, the lengths of oligonucleotides X and X′ are not identical. In another embodiment, the lengths of oligonucleotides X and Z or Z and X′ or X, Z and X′ are either identical or different. In one embodiment, the double stranded oligonucleotide construct of Formula I(a) includes one or more, specifically 1, 2, 3 or 4, mismatches, to the extent such mismatches do not significantly diminish the ability of the double stranded oligonucleotide to inhibit SREBP1 target gene expression.

[0482] In one embodiment, a DFO molecule of the invention comprises structure having Formula DFO-II:

5′-p-XX′-3′

wherein each X and X′ are independently oligonucleotides of length about 12 nucleotides to about 21 nucleotides, wherein X comprises, for example, a nucleic acid sequence of length about 12 to about 21 nucleotides (e.g., about 12, 13, 14, 15, 16, 17, 18, 19, 20 or 21 nucleotides), X′ comprises a nucleic acid sequence, for example of length about 12 to about 21 nucleotides (e.g., about 12, 13, 14, 15, 16, 17, 18, 19, 20, or 21 nucleotides) having nucleotide sequence complementarity to sequence X or a portion thereof, p comprises a terminal phosphate group that can be present or absent, and wherein X comprises a nucleotide sequence that is complementary to a SREBP1 target nucleic acid sequence (e.g., SREBP1 target RNA) or a portion thereof and is of length sufficient to interact (e.g., base pair) with the SREBP1 target nucleic acid sequence of a portion thereof. In one embodiment, the length of oligonucleotides X and X′ are identical. In another embodiment the length of oligonucleotides X and X′ are not identical. In one embodiment, length of the oligonucleotides X and X′ are sufficient to form a relatively stable double stranded oligonucleotide.

[0483] In one embodiment, the invention features a double stranded oligonucleotide construct having Formula DFO-II(a):

5′-p-XX′-3′

3′-X′X-p-5′

wherein each X and X′ are independently oligonucleotides of length about 12 nucleotides to about 21 nucleotides, wherein X comprises a nucleic acid sequence, for example of length about 12 to about 21 nucleotides (e.g., about 12, 13, 14, 15, 16, 17, 18, 19, 20 or 21 nucleotides), X′ comprises a nucleic acid sequence, for example of length about 12 to about 21 nucleotides (e.g., about 12, 13, 14, 15, 16, 17, 18, 19, 20 or 21 nucleotides) having nucleotide sequence complementarity to sequence X or a portion thereof, p comprises a terminal phosphate group that can be present or absent, and wherein X comprises nucleotide sequence that is complementary to a SREBP1 target nucleic acid sequence or a portion thereof (e.g., SREBP1 RNA target) and is of length sufficient to interact (e.g., base pair) with the SREBP1 target nucleic acid sequence (e.g., SREBP1 target RNA) or a portion thereof. In one embodiment, the lengths of oligonucleotides X and X′ are identical. In another embodiment, the lengths of oligonucleotides X and X′ are not identical. In one embodiment, the lengths of the oligonucleotides X and X′ are sufficient to form a relatively stable double stranded oligonucleotide. In one embodiment, the double stranded oligonucleotide construct of Formula II(a) includes one or more, specifically 1, 2, 3 or 4, mismatches, to the extent such mismatches do not significantly diminish the ability of the double stranded oligonucleotide to inhibit SREBP1 target gene expression.

[0484] In one embodiment, the invention features a DFO molecule having Formula DFO-I(b):

5′-p-Z-3′

where Z comprises a palindromic or repeat nucleic acid sequence optionally including one or more non-standard or modified nucleotides (e.g., nucleotide with a modified base, such as 2-amino purine or a universal base) that can facilitate base-pairing with other nucleotides. Z can be, for example, of length sufficient to interact (e.g., base pair) with nucleotide sequence of a SREBP1 target nucleic acid (e.g., SREBP1 target RNA) molecule, preferably of length of at least 12 nucleotides, specifically about 12 to about 24 nucleotides (e.g., about 12, 14, 16, 18, 20, 22 or 24 nucleotides). p represents a terminal phosphate group that can be present or absent.

[0485] In one embodiment, a DFO molecule having any of Formula DFO-I, DFO-I(a), DFO-I(b), DFO-II(a) or DFO-II can comprise chemical modifications as described herein without limitation, such as, for example, nucleotides having any of Formulae I-VII, stabilization chemistries as described in Table IV, or any other combination of modified nucleotides and non-nucleotides as described in the various embodiments herein.

[0486] In one embodiment, the palindrome or repeat sequence or modified nucleotide (e.g., nucleotide with a modified base, such as 2-amino purine or a universal base) in Z of DFO constructs having Formula DFO-I, DFO-I(a) and DFO-I(b), comprises chemically modified nucleotides that are able to interact with a portion of the SREBP1 target nucleic acid sequence (e.g., modified base analogs that can form Watson Crick base pairs or non-Watson Crick base pairs).

[0487] In one embodiment, a DFO molecule of the invention, for example a DFO having Formula DFO-I or DFO-II, comprises about 15 to about 40 nucleotides (e.g., about 15, 16, 17, 18, 19, 20, 21, 22, 23, 24, 25, 26, 27, 28, 29, 30, 31, 32, 33, 34, 35, 36, 37, 38, 39, or 40 nucleotides). In one embodiment, a DFO molecule of the invention comprises one or more chemical modifications. In a non-limiting example, the introduction of chemically modified nucleotides and/or non-nucleotides into nucleic acid molecules of the invention provides a powerful tool in overcoming potential limitations of in vivo stability and bioavailability inherent to unmodified RNA molecules that are delivered exogenously. For example, the use of chemically modified nucleic acid molecules can enable a lower dose of a particular nucleic acid molecule for a given therapeutic effect since chemically modified nucleic acid molecules tend to have a longer half-life in serum or in cells or tissues. Furthermore, certain chemical modifications can improve the bioavailability and/or potency of nucleic acid molecules by not only enhancing half-life but also facilitating the targeting of nucleic acid molecules to particular organs, cells or tissues and/or improving cellular uptake of the nucleic acid molecules. Therefore, even if the activity of a chemically modified nucleic acid molecule is reduced in vitro as compared to a native/unmodified nucleic acid molecule, for example when compared to an unmodified RNA molecule, the overall activity of the modified nucleic acid molecule can be greater than the native or unmodified nucleic acid molecule due to improved stability, potency, duration of effect, bioavailability and/or delivery of the molecule.

Multifunctional or Multi-Targeted siNA Molecules of the Invention

[0488] In one embodiment, the invention features siNA molecules comprising multifunctional short interfering nucleic acid (multifunctional siNA) molecules that modulate the expression of one or more SREBP1 target genes in a biologic system, such as a cell, tissue, or organism. The multifunctional short interfering nucleic acid (multifunctional siNA) molecules of the invention can target more than one region of the SREBP1 target nucleic acid sequence or can target sequences of more than one distinct target nucleic acid molecules (e.g., SREBP1 or SREBP1 pathway RNA and/or DNA targets). The multifunctional siNA molecules of the invention can be chemically synthesized or expressed from transcription units and/or vectors. The multifunctional siNA molecules of the instant invention provide useful reagents and methods for a variety of human applications, therapeutic, diagnostic, agricultural, veterinary, target validation, genomic discovery, genetic engineering and pharmacogenomic applications.

[0489] Applicant demonstrates herein that certain oligonucleotides, referred to herein for convenience but not limitation as multifunctional short interfering nucleic acid or multifunctional siNA molecules, are potent mediators of sequence specific regulation of gene expression. The multifunctional siNA molecules of the invention are distinct from other nucleic acid sequences known in the art (e.g., siRNA, miRNA, stRNA, shRNA, antisense oligonucleotides, etc.) in that they represent a class of polynucleotide molecules that are designed such that each strand in the multifunctional siNA construct comprises a nucleotide sequence that is complementary to a distinct nucleic acid sequence in one or more target nucleic acid molecules. A single multifunctional siNA molecule (generally a double-stranded molecule) of the invention can thus target more than one (e.g., 2, 3, 4, 5, or more) differing target nucleic acid target molecules. Nucleic acid molecules of the invention can also target more than one (e.g., 2, 3, 4, 5, or more) region of the same target nucleic acid sequence. As such multifunctional siNA molecules of the invention are useful in down regulating or inhibiting the expression of one or more target nucleic acid molecules. For example, a multifunctional siNA molecule of the invention can target (e.g., have complementarity to) nucleic acid molecules selected from the group consisting of SREBP1, H6PD, PTP-1B, apoAI/CIII/AIV, CETP, ApoB, PCSK9, calcium/calmodulin-dependent protein kinase ID, fatty acid binding protein 5, proprotein convertase subtilisin/kexin 9, LXR target genes, metalloprotease domain 11, apoptosis-inhibitory 6, F-box-only protein 3 or any combination thereof. By reducing or inhibiting expression of more than one target nucleic acid molecule with one multifunctional siNA construct, multifunctional siNA molecules of the invention represent a class of potent therapeutic agents that can provide simultaneous inhibition of multiple targets within a disease (e.g., angiogenic) related pathway. Such simultaneous inhibition can provide synergistic therapeutic treatment strategies without the need for separate preclinical and clinical development efforts or complex regulatory approval process.

[0490] Use of multifunctional siNA molecules that target more then one region of a target nucleic acid molecule (e.g., SREBP1 target RNA or DNA) is expected to provide potent inhibition of gene expression. For example, a single multifunctional siNA construct of the invention can target both conserved and variable regions of a target nucleic acid molecule (e.g., SREBP1 RNA or DNA), thereby allowing down regulation or inhibition of different SREBP1 isoforms or variants to optimize therapeutic efficacy and minimize toxicity, or allowing for targeting of both coding and non-coding regions of the SREBP1 target nucleic acid molecule.

[0491] Generally, double stranded oligonucleotides are formed by the assembly of two distinct oligonucleotides where the oligonucleotide sequence of one strand is complementary to the oligonucleotide sequence of the second strand; such double stranded oligonucleotides are generally assembled from two separate oligonucleotides (e.g., siRNA). Alternately, a duplex can be formed from a single molecule that folds on itself (e.g., shRNA or short hairpin RNA). These double stranded oligonucleotides are known in the art to mediate RNA interference and all have a common feature wherein only one nucleotide sequence region (guide sequence or the antisense sequence) has complementarity to a target nucleic acid sequence, and the other strand (sense sequence) comprises nucleotide sequence that is homologous to the target nucleic acid sequence. Generally, the antisense sequence is retained in the active RISC complex and guides the RISC to the target nucleotide sequence by means of complementary base-pairing of the antisense sequence with the target sequence for mediating sequence-specific RNA interference. It is known in the art that in some cell culture systems, certain types of unmodified siRNAs can exhibit “off target” effects. It is hypothesized that this off-target effect involves the participation of the sense sequence instead of the antisense sequence of the siRNA in the RISC complex (see for example Schwarz et al., 2003, Cell, 115, 199-208). In this instance the sense sequence is believed to direct the RISC complex to a sequence (off-target sequence) that is distinct from the intended target sequence, resulting in the inhibition of the off-target sequence. In these double stranded nucleic acid molecules, each strand is complementary to a distinct target nucleic acid sequence. However, the off-targets that are affected by these dsRNAs are not entirely predictable and are non-specific.

[0492] Distinct from the double stranded nucleic acid molecules known in the art, the applicants have developed a novel, potentially cost effective and simplified method of down regulating or inhibiting the expression of more than one target nucleic acid sequence using a single multifunctional siNA construct. The multifunctional siNA molecules of the invention are designed to be double-stranded or partially double stranded, such that a portion of each strand or region of the multifunctional siNA is complementary to a target nucleic acid sequence of choice. As such, the multifunctional siNA molecules of the invention are not limited to targeting sequences that are complementary to each other, but rather to any two differing target nucleic acid sequences. Multifunctional siNA molecules of the invention are designed such that each strand or region of the multifunctional siNA molecule, that is complementary to a given target nucleic acid sequence, is of suitable length (e.g., from about 16 to about 28 nucleotides in length, preferably from about 18 to about 28 nucleotides in length) for mediating RNA interference against the target nucleic acid sequence. The complementarity between the target nucleic acid sequence and a strand or region of the multifunctional siNA must be sufficient (at least about 8 base pairs) for cleavage of the target nucleic acid sequence by RNA interference. Multifunctional siNA of the invention is expected to minimize off-target effects seen with certain siRNA sequences, such as those described in Schwarz et al., supra.

[0493] It has been reported that dsRNAs of length between 29 base pairs and 36 base pairs (Tuschl et al., International PCT Publication No. WO 02/44321) do not mediate RNAi. One reason these dsRNAs are inactive may be the lack of turnover or dissociation of the strand that interacts with the target RNA sequence, such that the RISC complex is not able to efficiently interact with multiple copies of the target RNA resulting in a significant decrease in the potency and efficiency of the RNAi process. Applicant has surprisingly found that the multifunctional siNAs of the invention can overcome this hurdle and are capable of enhancing the efficiency and potency of RNAi process. As such, in certain embodiments of the invention, multifunctional siNAs of length of about 29 to about 36 base pairs can be designed such that, a portion of each strand of the multifunctional siNA molecule comprises a nucleotide sequence region that is complementary to a target nucleic acid of length sufficient to mediate RNAi efficiently (e.g., about 15 to about 23 base pairs) and a nucleotide sequence region that is not complementary to the target nucleic acid. By having both complementary and non-complementary portions in each strand of the multifunctional siNA, the multifunctional siNA can mediate RNA interference against a target nucleic acid sequence without being prohibitive to turnover or dissociation (e.g., where the length of each strand is too long to mediate RNAi against the respective target nucleic acid sequence). Furthermore, design of multifunctional siNA molecules of the invention with internal overlapping regions allows the multifunctional siNA molecules to be of favorable (decreased) size for mediating RNA interference and of size that is well suited for use as a therapeutic agent (e.g., wherein each strand is independently from about 18 to about 28 nucleotides in length). Non-limiting examples are illustrated in FIGS. 16-28 and Table III.

[0494] In one embodiment, a multifunctional siNA molecule of the invention comprises a first region and a second region, where the first region of the multifunctional siNA comprises a nucleotide sequence complementary to a nucleic acid sequence of a first target nucleic acid molecule, and the second region of the multifunctional siNA comprises nucleic acid sequence complementary to a nucleic acid sequence of a second target nucleic acid molecule. In one embodiment, a multifunctional siNA molecule of the invention comprises a first region and a second region, where the first region of the multifunctional siNA comprises nucleotide sequence complementary to a nucleic acid sequence of the first region of a target nucleic acid molecule, and the second region of the multifunctional siNA comprises nucleotide sequence complementary to a nucleic acid sequence of a second region of a the target nucleic acid molecule. In another embodiment, the first region and second region of the multifunctional siNA can comprise separate nucleic acid sequences that share some degree of complementarity (e.g., from about 1 to about 10 complementary nucleotides). In certain embodiments, multifunctional siNA constructs comprising separate nucleic acid sequences can be readily linked post-synthetically by methods and reagents known in the art and such linked constructs are within the scope of the invention. Alternately, the first region and second region of the multifunctional siNA can comprise a single nucleic acid sequence having some degree of self complementarity, such as in a hairpin or stem-loop structure. Non-limiting examples of such double stranded and hairpin multifunctional short interfering nucleic acids are illustrated in FIGS. 16 and 17 respectively. These multifunctional short interfering nucleic acids (multifunctional siNAs) can optionally include certain overlapping nucleotide sequence where such overlapping nucleotide sequence is present in between the first region and the second region of the multifunctional siNA (see for example FIGS. 18 and 19).

[0495] In one embodiment, the invention features a multifunctional short interfering nucleic acid (multifunctional siNA) molecule, wherein each strand of the multifunctional siNA independently comprises a first region of nucleic acid sequence that is complementary to a distinct target nucleic acid sequence and the second region of nucleotide sequence that is not complementary to the target sequence. The target nucleic acid sequence of each strand is in the same target nucleic acid molecule or different target nucleic acid molecules.

[0496] In another embodiment, the multifunctional siNA comprises two strands, where: (a) the first strand comprises a region having sequence complementarity to a target nucleic acid sequence (complementary region 1) and a region having no sequence complementarity to the target nucleotide sequence (non-complementary region 1); (b) the second strand of the multifunction siNA comprises a region having sequence complementarity to a target nucleic acid sequence that is distinct from the target nucleotide sequence complementary to the first strand nucleotide sequence (complementary region 2), and a region having no sequence complementarity to the target nucleotide sequence of complementary region 2 (non-complementary region 2); (c) the complementary region 1 of the first strand comprises a nucleotide sequence that is complementary to a nucleotide sequence in the non-complementary region 2 of the second strand and the complementary region 2 of the second strand comprises a nucleotide sequence that is complementary to a nucleotide sequence in the non-complementary region 1 of the first strand. The target nucleic acid sequence of complementary region 1 and complementary region 2 is in the same target nucleic acid molecule or different target nucleic acid molecules.

[0497] In another embodiment, the multifunctional siNA comprises two strands, where: (a) the first strand comprises a region having sequence complementarity to a target nucleic acid sequence derived from a gene (e.g., a first SREBP1 gene) (complementary region 1) and a region having no sequence complementarity to the target nucleotide sequence of complementary region 1 (non-complementary region 1); (b) the second strand of the multifunction siNA comprises a region having sequence complementarity to a target nucleic acid sequence derived from a gene (e.g., a second SREBP1 gene) that is distinct from the gene of complementary region 1 (complementary region 2), and a region having no sequence complementarity to the target nucleotide sequence of complementary region 2 (non-complementary region 2); (c) the complementary region 1 of the first strand comprises a nucleotide sequence that is complementary to a nucleotide sequence in the non-complementary region 2 of the second strand and the complementary region 2 of the second strand comprises a nucleotide sequence that is complementary to a nucleotide sequence in the non-complementary region 1 of the first strand.

[0498] In another embodiment, the multifunctional siNA comprises two strands, where: (a) the first strand comprises a region having sequence complementarity to a target nucleic acid sequence derived from a gene (e.g., SREBP1 gene) (complementary region 1) and a region having no sequence complementarity to the target nucleotide sequence of complementary region 1 (non-complementary region 1); (b) the second strand of the multifunction siNA comprises a region having sequence complementarity to a target nucleic acid sequence distinct from the target nucleic acid sequence of complementary region 1 (complementary region 2), provided, however, that the target nucleic acid sequence for complementary region 1 and target nucleic acid sequence for complementary region 2 are both derived from the same gene, and a region having no sequence complementarity to the target nucleotide sequence of complementary region 2 (non-complementary region 2); (c) the complementary region 1 of the first strand comprises a nucleotide sequence that is complementary to a nucleotide sequence in the non-complementary region 2 of the second strand and the complementary region 2 of the second strand comprises a nucleotide sequence that is complementary to nucleotide sequence in the non-complementary region 1 of the first strand.

[0499] In one embodiment, the invention features a multifunctional short interfering nucleic acid (multifunctional siNA) molecule, wherein the multifunctional siNA comprises two complementary nucleic acid sequences in which the first sequence comprises a first region having nucleotide sequence complementary to nucleotide sequence within a first target nucleic acid molecule, and in which the second sequence comprises a first region having nucleotide sequence complementary to a distinct nucleotide sequence within the same target nucleic acid molecule. Preferably, the first region of the first sequence is also complementary to the nucleotide sequence of the second region of the second sequence, and where the first region of the second sequence is complementary to the nucleotide sequence of the second region of the first sequence.

[0500] In one embodiment, the invention features a multifunctional short interfering nucleic acid (multifunctional siNA) molecule, wherein the multifunctional siNA comprises two complementary nucleic acid sequences in which the first sequence comprises a first region having a nucleotide sequence complementary to a nucleotide sequence within a first target nucleic acid molecule, and in which the second sequence comprises a first region having a nucleotide sequence complementary to a distinct nucleotide sequence within a second target nucleic acid molecule. Preferably, the first region of the first sequence is also complementary to the nucleotide sequence of the second region of the second sequence, and where the first region of the second sequence is complementary to the nucleotide sequence of the second region of the first sequence.

[0501] In one embodiment, the invention features a multifunctional siNA molecule comprising a first region and a second region, where the first region comprises a nucleic acid sequence having about 18 to about 28 nucleotides complementary to a nucleic acid sequence within a first target nucleic acid molecule, and the second region comprises nucleotide sequence having about 18 to about 28 nucleotides complementary to a distinct nucleic acid sequence within a second target nucleic acid molecule.

[0502] In one embodiment, the invention features a multifunctional siNA molecule comprising a first region and a second region, where the first region comprises nucleic acid sequence having about 18 to about 28 nucleotides complementary to a nucleic acid sequence within a target nucleic acid molecule, and the second region comprises nucleotide sequence having about 18 to about 28 nucleotides complementary to a distinct nucleic acid sequence within the same target nucleic acid molecule.

[0503] In one embodiment, the invention features a double stranded multifunctional short interfering nucleic acid (multifunctional siNA) molecule, wherein one strand of the multifunctional siNA comprises a first region having nucleotide sequence complementary to a first target nucleic acid sequence, and the second strand comprises a first region having a nucleotide sequence complementary to a second target nucleic acid sequence. The first and second target nucleic acid sequences can be present in separate target nucleic acid molecules or can be different regions within the same target nucleic acid molecule. As such, multifunctional siNA molecules of the invention can be used to target the expression of different genes, splice variants of the same gene, both mutant and conserved regions of one or more gene transcripts, or both coding and non-coding sequences of the same or differing genes or gene transcripts.

[0504] In one embodiment, a target nucleic acid molecule of the invention encodes a single protein. In another embodiment, a target nucleic acid molecule encodes more than one protein (e.g., 1, 2, 3, 4, 5 or more proteins). As such, a multifunctional siNA construct of the invention can be used to down regulate or inhibit the expression of several proteins. For example, a multifunctional siNA molecule comprising a region in one strand having nucleotide sequence complementarity to a first target nucleic acid sequence derived from a SREBP1 target, and the second strand comprising a region with nucleotide sequence complementarity to a second target nucleic acid sequence present in target nucleic acid molecules from genes encoding two proteins (e.g., two differing proteins) selected from the group consisting of SREBP1, H6PD, PTP-1B, apoAI/CIII/AIV, CETP, ApoB, PCSK9, calcium/calmodulin-dependent protein kinase 1D, fatty acid binding protein 5, proprotein convertase subtilisin/kexin 9, LXR target genes, metalloprotease domain 11, apoptosis-inhibitory 6, F-box-only protein 3 or any combination thereof, which can be used to down regulate, inhibit, or shut down a particular biologic pathway by targeting multiple SREBP1 or SREBP1 pathway genes.

[0505] In one embodiment the invention takes advantage of conserved nucleotide sequences present in different SREBP1 variants. By designing multifunctional siNAs in a manner where one strand includes a sequence that is complementary to one or more target nucleic acid sequences that are conserved among various SREBP1 family members and the other strand optionally includes sequence that is complementary to SREBP1 pathway target nucleic acid sequence, such as any of SREBP1, H6PD, PTP-1B, apoAI/CIII/AIV, CETP, ApoB, PCSK9, calcium/calmodulin-dependent protein kinase ID, fatty acid binding protein 5, proprotein convertase subtilisin/kexin 9, LXR target genes, metalloprotease domain 11, apoptosis-inhibitory 6, F-box-only protein 3, it is possible to selectively and effectively inhibit a SREBP1 disease related biological pathway (e.g., hyperlipidemia and/or insulin resistance) using a single multifunctional siNA.

[0506] In one embodiment, a multifunctional short interfering nucleic acid (multifunctional siNA) of the invention comprises a first region and a second region, wherein the first region comprises nucleotide sequence complementary to a first SREBP1 RNA of a first SREBP1 target and the second region comprises nucleotide sequence complementary to a second SREBP1 RNA of a second SREBP1 target. In one embodiment, the first and second regions can comprise nucleotide sequence complementary to shared or conserved RNA sequences of differing SREBP1 target sites within the same SREBP1 target sequence or shared amongst different SREBP1 target sequences.

[0507] In one embodiment, a double stranded multifunctional siNA molecule of the invention comprises a structure having Formula MF-I:

5′-p-XZX′-3′

3′-Y′ZY-p-5′

wherein each 5′-p-XZX′-3′ and 5′-p-YZY′-3′ are independently an oligonucleotide of length about 20 nucleotides to about 300 nucleotides, preferably about 20 to about 200 nucleotides, about 20 to about 100 nucleotides, about 20 to about 40 nucleotides, about 20 to about 40 nucleotides, about 24 to about 38 nucleotides, or about 26 to about 38 nucleotides; XZ comprises a nucleic acid sequence that is complementary to a first SREBP1 target nucleic acid sequence; YZ is an oligonucleotide comprising nucleic acid sequence that is complementary to a second SREBP1 target nucleic acid sequence; Z comprises nucleotide sequence of length about 1 to about 24 nucleotides (e.g., about 1, 2, 3, 4, 5, 6, 7, 8, 9, 10, 11, 12, 13, 14, 15, 16, 17, 18, 19, 20, 21, 22, 23, or 24 nucleotides) that is self complementary; X comprises nucleotide sequence of length about 1 to about 100 nucleotides, preferably about 1 to about 21 nucleotides (e.g., about 1, 2, 3, 4, 5, 6, 7, 8, 9, 10, 11, 12, 13, 14, 15, 16, 17, 18, 19, 20, or 21 nucleotides) that is complementary to nucleotide sequence present in region Y′; Y comprises nucleotide sequence of length about 1 to about 100 nucleotides, preferably about 1 to about 21 nucleotides (e.g., about 1, 2, 3, 4, 5, 6, 7, 8, 9, 10, 11, 12, 13, 14, 15, 16, 17, 18, 19, 20 or 21 nucleotides) that is complementary to nucleotide sequence present in region X′; each p comprises a terminal phosphate group that is independently present or absent; each XZ and YZ is independently of length sufficient to stably interact (i.e., base pair) with the first and second target nucleic acid sequence, respectively, or a portion thereof. For example, each sequence X and Y can independently comprise sequence from about 12 to about 21 or more nucleotides in length (e.g., about 12, 13, 14, 15, 16, 17, 18, 19, 20, 21, or more) that is complementary to a target nucleotide sequence in different target nucleic acid molecules, such as target RNAs or a portion thereof. In another non-limiting example, the length of the nucleotide sequence of X and Z together that is complementary to the first SREBP1 target nucleic acid sequence or a portion thereof is from about 12 to about 21 or more nucleotides (e.g., about 12, 13, 14, 15, 16, 17, 18, 19, 20, 21, or more). In another non-limiting example, the length of the nucleotide sequence of Y and Z together, that is complementary to the second SREBP1 target nucleic acid sequence or a portion thereof is from about 12 to about 21 or more nucleotides (e.g., about 12, 13, 14, 15, 16, 17, 18, 19, 20, 21, or more). In one embodiment, the first SREBP1 target nucleic acid sequence and the second SREBP1 target nucleic acid sequence are present in the same target nucleic acid molecule (e.g., SREBP1 target RNA or SREBP1 pathway target RNA such as SREBP1, H6PD, PTP-1B, apoAI/CIII/AIV, CETP, ApoB, PCSK9, calcium/calmodulin-dependent protein kinase 1D, fatty acid binding protein 5, proprotein convertase subtilisin/kexin 9, LXR target genes, metalloprotease domain 11, apoptosis-inhibitory 6, and/or F-box-only protein 3 RNA). In another embodiment, the first SREBP1 target nucleic acid sequence and the second SREBP1 target nucleic acid sequence are present in different target nucleic acid molecules (e.g., SREBP1 target RNA and SREBP1 pathway target RNA). In one embodiment, Z comprises a palindrome or a repeat sequence. In one embodiment, the lengths of oligonucleotides X and X′ are identical. In another embodiment, the lengths of oligonucleotides X and X′ are not identical. In one embodiment, the lengths of oligonucleotides Y and Y′ are identical. In another embodiment, the lengths of oligonucleotides Y and Y′ are not identical. In one embodiment, the double stranded oligonucleotide construct of Formula I(a) includes one or more, specifically 1, 2, 3 or 4, mismatches, to the extent such mismatches do not significantly diminish the ability of the double stranded oligonucleotide to inhibit target gene expression.

[0508] In one embodiment, a multifunctional siNA molecule of the invention comprises a structure having Formula MF-II:

5′-p-XX′-3′

3′-Y′Y-p-5′

wherein each 5′-p-XX′-3′ and 5′-p-YY′-3′ are independently an oligonucleotide of length about 20 nucleotides to about 300 nucleotides, preferably about 20 to about 200 nucleotides, about 20 to about 100 nucleotides, about 20 to about 40 nucleotides, about 20 to about 40 nucleotides, about 24 to about 38 nucleotides, or about 26 to about 38 nucleotides; X comprises a nucleic acid sequence that is complementary to a first target nucleic acid sequence; Y is an oligonucleotide comprising nucleic acid sequence that is complementary to a second target nucleic acid sequence; X comprises a nucleotide sequence of length about 1 to about 100 nucleotides, preferably about 1 to about 21 nucleotides (e.g., about 1, 2, 3, 4, 5, 6, 7, 8, 9, 10, 11, 12, 13, 14, 15, 16, 17, 18, 19, 20, or 21 nucleotides) that is complementary to nucleotide sequence present in region Y′; Y comprises nucleotide sequence of length about 1 to about 100 nucleotides, preferably about 1 to about 21 nucleotides (e.g., about 1, 2, 3, 4, 5, 6, 7, 8, 9, 10, 11, 12, 13, 14, 15, 16, 17, 18, 19, 20 or 21 nucleotides) that is complementary to nucleotide sequence present in region X′; each p comprises a terminal phosphate group that is independently present or absent; each X and Y independently is of length sufficient to stably interact (i.e., base pair) with the first and second target nucleic acid sequence, respectively, or a portion thereof. For example, each sequence X and Y can independently comprise sequence from about 12 to about 21 or more nucleotides in length (e.g., about 12, 13, 14, 15, 16, 17, 18, 19, 20, 21, or more) that is complementary to a target nucleotide sequence in different target nucleic acid molecules, such as SREBP1 target RNAs or a portion thereof. In one embodiment, the first SREBP1 target nucleic acid sequence and the second SREBP1 target nucleic acid sequence are present in the same target nucleic acid molecule (e.g., SREBP1 target RNA or SREBP1 pathway target RNA such as H6PD, PTP-1B, apoAI/CIII/AIV, and/or CETP RNA). In another embodiment, the first SREBP1 target nucleic acid sequence and the second SREBP1 target nucleic acid sequence are present in different target nucleic acid molecules (e.g., SREBP1 target RNA and SREBP1 pathway target RNA, such as H6PD, PTP-1B, apoAI/CIII/AIV, and/or CETP RNA). In one embodiment, Z comprises a palindrome or a repeat sequence. In one embodiment, the lengths of oligonucleotides X and X′ are identical. In another embodiment, the lengths of oligonucleotides X and X′ are not identical. In one embodiment, the lengths of oligonucleotides Y and Y′ are identical. In another embodiment, the lengths of oligonucleotides Y and Y′ are not identical. In one embodiment, the double stranded oligonucleotide construct of Formula I(a) includes one or more, specifically 1, 2, 3 or 4, mismatches, to the extent such mismatches do not significantly diminish the ability of the double stranded oligonucleotide to inhibit target gene expression.

[0509] In one embodiment, a multifunctional siNA molecule of the invention comprises a structure having Formula MF-III:

XX′

Y′—W—Y

wherein each X, X′, Y, and Y′ is independently an oligonucleotide of length about 15 nucleotides to about 50 nucleotides, preferably about 18 to about 40 nucleotides, or about 19 to about 23 nucleotides; X comprises nucleotide sequence that is complementary to nucleotide sequence present in region Y′; X′ comprises nucleotide sequence that is complementary to nucleotide sequence present in region Y; each X and X′ is independently of length sufficient to stably interact (i.e., base pair) with a first and a second SREBP1 target nucleic acid sequence, respectively, or a portion thereof; W represents a nucleotide or non-nucleotide linker that connects sequences Y′ and Y; and the multifunctional siNA directs cleavage of the first and second SREBP1 target sequence via RNA interference. In one embodiment, the first SREBP1 target nucleic acid sequence and the second SREBP1 target nucleic acid sequence are present in the same target nucleic acid molecule (e.g., SREBP1 target RNA or SREBP1 pathway target RNA such as SREBP1, H6PD, PTP-1B, apoAI/CIII/AIV, CETP, ApoB, PCSK9, calcium/calmodulin-dependent protein kinase ID, fatty acid binding protein 5, proprotein convertase subtilisin/kexin 9, LXR target genes, metalloprotease domain 11, apoptosis-inhibitory 6, and/or F-box-only protein 3 RNA). In another embodiment, the first SREBP1 target nucleic acid sequence and the second SREBP1 target nucleic acid sequence are present in different target nucleic acid molecules (e.g., SREBP1 target RNA and SREBP1 pathway target RNA such as SREBP1, H6PD, PTP-1B, apoAI/CIII/AIV, CETP, ApoB, PCSK9, calcium/calmodulin-dependent protein kinase 1D, fatty acid binding protein 5, proprotein convertase subtilisin/kexin 9, LXR target genes, metalloprotease domain 11, apoptosis-inhibitory 6, and/or F-box-only protein 3 RNA). In one embodiment, region W connects the 3′-end of sequence Y′ with the 3′-end of sequence Y. In one embodiment, region W connects the 3′-end of sequence Y′ with the 5′-end of sequence Y. In one embodiment, region W connects the 5′-end of sequence Y′ with the 5′-end of sequence Y. In one embodiment, region W connects the 5′-end of sequence Y′ with the 3′-end of sequence Y. In one embodiment, a terminal phosphate group is present at the 5′-end of sequence X. In one embodiment, a terminal phosphate group is present at the 5′-end of sequence X′. In one embodiment, a terminal phosphate group is present at the 5′-end of sequence Y. In one embodiment, a terminal phosphate group is present at the 5′-end of sequence Y′. In one embodiment, W connects sequences Y and Y′ via a biodegradable linker. In one embodiment, W further comprises a conjugate, label, aptamer, ligand, lipid, or polymer.

[0510] In one embodiment, a multifunctional siNA molecule of the invention comprises a structure having Formula MF-IV:

XX′

Y′—W—Y

wherein each X, X′, Y, and Y′ is independently an oligonucleotide of length about 15 nucleotides to about 50 nucleotides, preferably about 18 to about 40 nucleotides, or about 19 to about 23 nucleotides; X comprises nucleotide sequence that is complementary to nucleotide sequence present in region Y′; X′ comprises nucleotide sequence that is complementary to nucleotide sequence present in region Y; each Y and Y′ is independently of length sufficient to stably interact (i.e., base pair) with a first and a second SREBP1 target nucleic acid sequence, respectively, or a portion thereof; W represents a nucleotide or non-nucleotide linker that connects sequences Y′ and Y; and the multifunctional siNA directs cleavage of the first and second SREBP1 target sequence via RNA interference. In one embodiment, the first SREBP1 target nucleic acid sequence and the second SREBP1 target nucleic acid sequence are present in the same target nucleic acid molecule (e.g., SREBP1, H6PD, PTP-1B, apoAI/CIII/AIV, CETP, ApoB, PCSK9, calcium/calmodulin-dependent protein kinase 1D, fatty acid binding protein 5, proprotein convertase subtilisin/kexin 9, LXR target genes, metalloprotease domain 11, apoptosis-inhibitory 6, and/or F-box-only protein 3 RNA). In another embodiment, the first SREBP1 target nucleic acid sequence and the second SREBP1 target nucleic acid sequence are present in different target nucleic acid molecules (e.g., SREBP1 target RNA and SREBP1 pathway target RNA such as SREBP1, H6PD, PTP-1B, apoAI/CIII/AIV, CETP, ApoB, PCSK9, calcium/calmodulin-dependent protein kinase 1D, fatty acid binding protein 5, proprotein convertase subtilisin/kexin 9, LXR target genes, metalloprotease domain 11, apoptosis-inhibitory 6, and/or F-box-only protein 3 RNA). In one embodiment, region W connects the 3′-end of sequence Y′ with the 3′-end of sequence Y. In one embodiment, region W connects the 3′-end of sequence Y′ with the 5′-end of sequence Y. In one embodiment, region W connects the 5′-end of sequence Y′ with the 5′-end of sequence Y. In one embodiment, region W connects the 5′-end of sequence Y′ with the 3′-end of sequence Y. In one embodiment, a terminal phosphate group is present at the 5′-end of sequence X. In one embodiment, a terminal phosphate group is present at the 5′-end of sequence X′. In one embodiment, a terminal phosphate group is present at the 5′-end of sequence Y. In one embodiment, a terminal phosphate group is present at the 5′-end of sequence Y′. In one embodiment, W connects sequences Y and Y′ via a biodegradable linker. In one embodiment, W further comprises a conjugate, lable, aptamer, ligand, lipid, or polymer.

[0511] In one embodiment, a multifunctional siNA molecule of the invention comprises a structure having Formula MF-V:

XX′

Y′—W—Y

wherein each X, X′, Y, and Y′ is independently an oligonucleotide of length about 15 nucleotides to about 50 nucleotides, preferably about 18 to about 40 nucleotides, or about 19 to about 23 nucleotides; X comprises nucleotide sequence that is complementary to nucleotide sequence present in region Y′; X′ comprises nucleotide sequence that is complementary to nucleotide sequence present in region Y; each X, X′, Y, or Y′ is independently of length sufficient to stably interact (i.e., base pair) with a first, second, third, or fourth SREBP1 target nucleic acid sequence, respectively, or a portion thereof; W represents a nucleotide or non-nucleotide linker that connects sequences Y′ and Y; and the multifunctional siNA directs cleavage of the first, second, third, and/or fourth target sequence via RNA interference. In one embodiment, the first, second, third and fourth SREBP1 target nucleic acid sequence are all present in the same target nucleic acid molecule (e.g., SREBP1 target RNA or SREBP1 pathway target RNA such as SREBP1, H6PD, PTP-1B, apoAI/CIII/AIV, CETP, ApoB, PCSK9, calcium/calmodulin-dependent protein kinase 1D, fatty acid binding protein 5, proprotein convertase subtilisin/kexin 9, LXR target genes, metalloprotease domain 11, apoptosis-inhibitory 6, and/or F-box-only protein 3 RNA). In another embodiment, the first, second, third and fourth SREBP1 target nucleic acid sequence are independently present in different target nucleic acid molecules (e.g., SREBP1 target RNA and SREBP1 pathway target RNA such as SREBP1, H6PD, PTP-1B, apoAI/CIII/AIV, CETP, ApoB, PCSK9, calcium/calmodulin-dependent protein kinase 1D, fatty acid binding protein 5, proprotein convertase subtilisin/kexin 9, LXR target genes, metalloprotease domain 11, apoptosis-inhibitory 6, and/or F-box-only protein 3 RNA). In one embodiment, region W connects the 3′-end of sequence Y′ with the 3′-end of sequence Y. In one embodiment, region W connects the 3′-end of sequence Y′ with the 5′-end of sequence Y. In one embodiment, region W connects the 5′-end of sequence Y′ with the 5′-end of sequence Y. In one embodiment, region W connects the 5′-end of sequence Y′ with the 3′-end of sequence Y. In one embodiment, a terminal phosphate group is present at the 5′-end of sequence X. In one embodiment, a terminal phosphate group is present at the 5′-end of sequence X′. In one embodiment, a terminal phosphate group is present at the 5′-end of sequence Y. In one embodiment, a terminal phosphate group is present at the 5′-end of sequence Y′. In one embodiment, W connects sequences Y and Y′ via a biodegradable linker. In one embodiment, W further comprises a conjugate, lable, aptamer, ligand, lipid, or polymer.

[0512] In one embodiment, regions X and Y of multifunctional siNA molecule of the invention (e.g., having any of Formula MF-I-MF-V), are complementary to different target nucleic acid sequences that are portions of the same target nucleic acid molecule. In one embodiment, such target nucleic acid sequences are at different locations within the coding region of a RNA transcript. In one embodiment, such target nucleic acid sequences comprise coding and non-coding regions of the same RNA transcript. In one embodiment, such target nucleic acid sequences comprise regions of alternately spliced transcripts or precursors of such alternately spliced transcripts.

[0513] In one embodiment, a multifunctional siNA molecule having any of Formula MF-I-MF-V can comprise chemical modifications as described herein without limitation, such as, for example, nucleotides having any of Formulae I-VII described herein, stabilization chemistries as described in Table IV, or any other combination of modified nucleotides and non-nucleotides as described in the various embodiments herein.

[0514] In one embodiment, the palindrome or repeat sequence or modified nucleotide (e.g., nucleotide with a modified base, such as 2-amino purine or a universal base) in Z of multifunctional siNA constructs having Formula MF-I or MF-II comprises chemically modified nucleotides that are able to interact with a portion of the target nucleic acid sequence (e.g., modified base analogs that can form Watson Crick base pairs or non-Watson Crick base pairs).

[0515] In one embodiment, a multifunctional siNA molecule of the invention, for example each strand of a multifunctional siNA having MF-I-MF-V, independently comprises about 15 to about 40 nucleotides (e.g., about 15, 16, 17, 18, 19, 20, 21, 22, 23, 24, 25, 26, 27, 28, 29, 30, 31, 32, 33, 34, 35, 36, 37, 38, 39, or 40 nucleotides). In one embodiment, a multifunctional siNA molecule of the invention comprises one or more chemical modifications. In a non-limiting example, the introduction of chemically modified nucleotides and/or non-nucleotides into nucleic acid molecules of the invention provides a powerful tool in overcoming potential limitations of in vivo stability and bioavailability inherent to unmodified RNA molecules that are delivered exogenously. For example, the use of chemically modified nucleic acid molecules can enable a lower dose of a particular nucleic acid molecule for a given therapeutic effect since chemically modified nucleic acid molecules tend to have a longer half-life in serum or in cells or tissues. Furthermore, certain chemical modifications can improve the bioavailability and/or potency of nucleic acid molecules by not only enhancing half-life but also facilitating the targeting of nucleic acid molecules to particular organs, cells or tissues and/or improving cellular uptake of the nucleic acid molecules. Therefore, even if the activity of a chemically modified nucleic acid molecule is reduced in vitro as compared to a native/unmodified nucleic acid molecule, for example when compared to an unmodified RNA molecule, the overall activity of the modified nucleic acid molecule can be greater than the native or unmodified nucleic acid molecule due to improved stability, potency, duration of effect, bioavailability and/or delivery of the molecule.

[0516] In another embodiment, the invention features multifunctional siNAs, wherein the multifunctional siNAs are assembled from two separate double-stranded siNAs, with one of the ends of each sense strand is tethered to the end of the sense strand of the other siNA molecule, such that the two antisense siNA strands are annealed to their corresponding sense strand that are tethered to each other at one end (see FIG. 22). The tethers or linkers can be nucleotide-based linkers or non-nucleotide based linkers as generally known in the art and as described herein.

[0517] In one embodiment, the invention features a multifunctional siNA, wherein the multifunctional siNA is assembled from two separate double-stranded siNAs, with the 5′-end of one sense strand of the siNA is tethered to the 5′-end of the sense strand of the other siNA molecule, such that the 5′-ends of the two antisense siNA strands, annealed to their corresponding sense strand that are tethered to each other at one end, point away (in the opposite direction) from each other (see FIG. 22 (A)). The tethers or linkers can be nucleotide-based linkers or non-nucleotide based linkers as generally known in the art and as described herein.

[0518] In one embodiment, the invention features a multifunctional siNA, wherein the multifunctional siNA is assembled from two separate double-stranded siNAs, with the 3′-end of one sense strand of the siNA is tethered to the 3′-end of the sense strand of the other siNA molecule, such that the 5′-ends of the two antisense siNA strands, annealed to their corresponding sense strand that are tethered to each other at one end, face each other (see FIG. 22 (B)). The tethers or linkers can be nucleotide-based linkers or non-nucleotide based linkers as generally known in the art and as described herein.

[0519] In one embodiment, the invention features a multifunctional siNA, wherein the multifunctional siNA is assembled from two separate double-stranded siNAs, with the 5′-end of one sense strand of the siNA is tethered to the 3′-end of the sense strand of the other siNA molecule, such that the 5′-end of the one of the antisense siNA strands annealed to their corresponding sense strand that are tethered to each other at one end, faces the 3′-end of the other antisense strand (see FIG. 22 (C-D)). The tethers or linkers can be nucleotide-based linkers or non-nucleotide based linkers as generally known in the art and as described herein.

[0520] In one embodiment, the invention features a multifunctional siNA, wherein the multifunctional siNA is assembled from two separate double-stranded siNAs, with the 5′-end of one antisense strand of the siNA is tethered to the 3′-end of the antisense strand of the other siNA molecule, such that the 5′-end of the one of the sense siNA strands annealed to their corresponding antisense sense strand that are tethered to each other at one end, faces the 3′-end of the other sense strand (see FIG. 22 (G-H)). In one embodiment, the linkage between the 5′-end of the first antisense strand and the 3′-end of the second antisense strand is designed in such a way as to be readily cleavable (e.g., biodegradable linker) such that the 5′ end of each antisense strand of the multifunctional siNA has a free 5′-end suitable to mediate RNA interference-based cleavage of the target RNA. The tethers or linkers can be nucleotide-based linkers or non-nucleotide based linkers as generally known in the art and as described herein.

[0521] In one embodiment, the invention features a multifunctional siNA, wherein the multifunctional siNA is assembled from two separate double-stranded siNAs, with the 5′-end of one antisense strand of the siNA is tethered to the 5′-end of the antisense strand of the other siNA molecule, such that the 3′-end of the one of the sense siNA strands annealed to their corresponding antisense sense strand that are tethered to each other at one end, faces the 3′-end of the other sense strand (see FIG. 22 (E)). In one embodiment, the linkage between the 5′-end of the first antisense strand and the 5′-end of the second antisense strand is designed in such a way as to be readily cleavable (e.g., biodegradable linker) such that the 5′ end of each antisense strand of the multifunctional siNA has a free 5′-end suitable to mediate RNA interference-based cleavage of the target RNA. The tethers or linkers can be nucleotide-based linkers or non-nucleotide based linkers as generally known in the art and as described herein.

[0522] In one embodiment, the invention features a multifunctional siNA, wherein the multifunctional siNA is assembled from two separate double-stranded siNAs, with the 3′-end of one antisense strand of the siNA is tethered to the 3′-end of the antisense strand of the other siNA molecule, such that the 5′-end of the one of the sense siNA strands annealed to their corresponding antisense sense strand that are tethered to each other at one end, faces the 3′-end of the other sense strand (see FIG. 22 (F)). In one embodiment, the linkage between the 5′-end of the first antisense strand and the 5′-end of the second antisense strand is designed in such a way as to be readily cleavable (e.g., biodegradable linker) such that the 5′ end of each antisense strand of the multifunctional siNA has a free 5′-end suitable to mediate RNA interference-based cleavage of the target RNA. The tethers or linkers can be nucleotide-based linkers or non-nucleotide based linkers as generally known in the art and as described herein.

[0523] In any of the above embodiments, a first target nucleic acid sequence or second target nucleic acid sequence can independently comprise SREBP1, H6PD, PTP-1B, apoAI/CIII/AIV, CETP, ApoB, PCSK9, calcium/calmodulin-dependent protein kinase 1D, fatty acid binding protein 5, proprotein convertase subtilisin/kexin 9, LXR target genes, metalloprotease domain 11, apoptosis-inhibitory 6, and/or F-box-only protein 3 RNA. In one embodiment, the first SREBP1 target nucleic acid sequence is a SREBP1 target RNA or a portion thereof and the second SREBP1 target nucleic acid sequence is a SREBP1 pathway target RNA, such as SREBP1, H6PD, PTP-1B, apoAI/CIII/AIV, CETP, ApoB, PCSK9, calcium/calmodulin-dependent protein kinase ID, fatty acid binding protein 5, proprotein convertase subtilisin/kexin 9, LXR target genes, metalloprotease domain 11, apoptosis-inhibitory 6, and/or F-box-only protein 3 RNA of a portion thereof.

### Synthesis of Nucleic Acid Molecules

[0524] Synthesis of nucleic acids greater than 100 nucleotides in length is difficult using automated methods, and the therapeutic cost of such molecules is prohibitive. In this invention, small nucleic acid motifs (“small” refers to nucleic acid motifs no more than 100 nucleotides in length, preferably no more than 80 nucleotides in length, and most preferably no more than 50 nucleotides in length; e.g., individual siNA oligonucleotide sequences or siNA sequences synthesized in tandem) are preferably used for exogenous delivery. The simple structure of these molecules increases the ability of the nucleic acid to invade targeted regions of protein and/or RNA structure. Exemplary molecules of the instant invention are chemically synthesized, and others can similarly be synthesized.

[0525] Oligonucleotides (e.g., certain modified oligonucleotides or portions of oligonucleotides lacking ribonucleotides) are synthesized using protocols known in the art, for example as described in Caruthers et al., 1992, Methods in Enzymology 211, 3-19, Thompson et al., International PCT Publication No. WO 99/54459, Wincott et al., 1995, Nucleic Acids Res. 23, 2677-2684, Wincott et al., 1997, Methods Mol. Bio., 74, 59, Brennan et al., 1998, Biotechnol Bioeng., 61, 33-45, and Brennan, U.S. Pat. No. 6,001,311. All of these references are incorporated herein by reference. The synthesis of oligonucleotides makes use of common nucleic acid protecting and coupling groups, such as dimethoxytrityl at the 5′-end, and phosphoramidites at the 3′-end. In a non-limiting example, small scale syntheses are conducted on a 394 Applied Biosystems, Inc. synthesizer using a 0.2 μmol scale protocol with a 2.5 min coupling step for 2′-O-methylated nucleotides and a 45 second coupling step for 2′-deoxy nucleotides or 2′-deoxy-2′-fluoro nucleotides. Table V outlines the amounts and the contact times of the reagents used in the synthesis cycle. Alternatively, syntheses at the 0.2 μmol scale can be performed on a 96-well plate synthesizer, such as the instrument produced by Protogene (Palo Alto, Calif.) with minimal modification to the cycle. A 33-fold excess (60 μL of 0.11 M=6.6 μmol) of 2′-O-methyl phosphoramidite and a 105-fold excess of S-ethyl tetrazole (60 μL of 0.25 M=15 μmol) can be used in each coupling cycle of 2′-O-methyl residues relative to polymer-bound 5′-hydroxyl. A 22-fold excess (40 μL of 0.11 M=4.4 μmol) of deoxy phosphoramidite and a 70-fold excess of S-ethyl tetrazole (40 μL of 0.25 M=10 μmol) can be used in each coupling cycle of deoxy residues relative to polymer-bound 5′-hydroxyl. Average coupling yields on the 394 Applied Biosystems, Inc. synthesizer, determined by calorimetric quantitation of the trityl fractions, are typically 97.5-99%. Other oligonucleotide synthesis reagents for the 394 Applied Biosystems, Inc. synthesizer include the following: detritylation solution is 3% TCA in methylene chloride (ABI); capping is performed with 16% N-methyl imidazole in THF (ABI) and 10% acetic anhydride/10% 2,6-lutidine in THF (ABI); and oxidation solution is 16.9 mM 12, 49 mM pyridine, 9% water in THF (PerSeptive Biosystems, Inc.). Burdick & Jackson Synthesis Grade acetonitrile is used directly from the reagent bottle. S-Ethyltetrazole solution (0.25 M in acetonitrile) is made up from the solid obtained from American International Chemical, Inc. Alternately, for the introduction of phosphorothioate linkages, Beaucage reagent (3H-1,2-Benzodithiol-3-one 1,1-dioxide, 0.05 M in acetonitrile) is used.

[0526] Deprotection of the DNA-based oligonucleotides is performed as follows: the polymer-bound trityl-on oligoribonucleotide is transferred to a 4 mL glass screw top vial and suspended in a solution of 40% aqueous methylamine (1 mL) at 65° C. for 10 minutes. After cooling to −20° C., the supernatant is removed from the polymer support. The support is washed three times with 1.0 mL of EtOH:MeCN:H2O/3:1:1, vortexed and the supernatant is then added to the first supernatant. The combined supernatants, containing the oligoribonucleotide, are dried to a white powder. In one embodiment, the nucleic acid molecules of the invention are synthesized, deprotected, and analyzed according to methods described in U.S. Pat. No. 6,995,259, U.S. Pat. No. 6,686,463, U.S. Pat. No. 6,673,918, U.S. Pat. No. 6,649,751, U.S. Pat. No. 6,989,442, and U.S. Ser. No. 10/190,359, all incorporated by reference herein in their entirety.

[0527] The method of synthesis used for RNA including certain siNA molecules of the invention follows the procedure as described in Usman et al., 1987, J. Am. Chem. Soc., 109, 7845; Scaringe et al., 1990, Nucleic Acids Res., 18, 5433; and Wincott et al., 1995, Nucleic Acids Res. 23, 2677-2684 Wincott et al., 1997, Methods Mol. Bio., 74, 59, and makes use of common nucleic acid protecting and coupling groups, such as dimethoxytrityl at the 5′-end, and phosphoramidites at the 3′-end. In a non-limiting example, small scale syntheses are conducted on a 394 Applied Biosystems, Inc. synthesizer using a 0.2 μmol scale protocol with a 7.5 min coupling step for alkylsilyl protected nucleotides and a 2.5 min coupling step for 2′-O-methylated nucleotides. Table V outlines the amounts and the contact times of the reagents used in the synthesis cycle. Alternatively, syntheses at the 0.2 μmol scale can be done on a 96-well plate synthesizer, such as the instrument produced by Protogene (Palo Alto, Calif.) with minimal modification to the cycle. A 33-fold excess (60 μL of 0.11 M=6.6 μmol) of 2′-O-methyl phosphoramidite and a 75-fold excess of S-ethyl tetrazole (60 μL of 0.25 M=15 μmol) can be used in each coupling cycle of 2′-O-methyl residues relative to polymer-bound 5′-hydroxyl. A 66-fold excess (120 μL of 0.11 M=13.2 μmol) of alkylsilyl (ribo) protected phosphoramidite and a 150-fold excess of S-ethyl tetrazole (120 μL of 0.25 M=30 μmol) can be used in each coupling cycle of ribo residues relative to polymer-bound 5′-hydroxyl. Average coupling yields on the 394 Applied Biosystems, Inc. synthesizer, determined by colorimetric quantitation of the trityl fractions, are typically 97.5-99%. Other oligonucleotide synthesis reagents for the 394 Applied Biosystems, Inc. synthesizer include the following: detritylation solution is 3% TCA in methylene chloride (ABI); capping is performed with 16% N-methyl imidazole in THF (ABI) and 10% acetic anhydride/10% 2,6-lutidine in THF (ABI); oxidation solution is 16.9 mM 12, 49 mM pyridine, 9% water in THF (PerSeptive Biosystems, Inc.). Burdick & Jackson Synthesis Grade acetonitrile is used directly from the reagent bottle. S-Ethyltetrazole solution (0.25 M in acetonitrile) is made up from the solid obtained from American International Chemical, Inc. Alternately, for the introduction of phosphorothioate linkages, Beaucage reagent (3H-1,2-Benzodithiol-3-one 1,1-dioxide 0.05 M in acetonitrile) is used.

[0528] Deprotection of the RNA is performed using either a two-pot or one-pot protocol. For the two-pot protocol, the polymer-bound trityl-on oligoribonucleotide is transferred to a 4 mL glass screw top vial and suspended in a solution of 40% aq. methylamine (1 mL) at 65° C. for 10 min. After cooling to −20° C., the supernatant is removed from the polymer support. The support is washed three times with 1.0 mL of EtOH:MeCN:H2O/3:1:1, vortexed and the supernatant is then added to the first supernatant. The combined supernatants, containing the oligoribonucleotide, are dried to a white powder. The base deprotected oligoribonucleotide is resuspended in anhydrous TEA/HF/NMP solution (300 μL of a solution of 1.5 mL N-methylpyrrolidinone, 750 μL TEA and 1 mL TEA-3HF to provide a 1.4 M HF concentration) and heated to 65° C. After 1.5 h, the oligomer is quenched with 1.5 M NH₄HCO₃. In one embodiment, the nucleic acid molecules of the invention are synthesized, deprotected, and analyzed according to methods described in U.S. Pat. No. 6,995,259, U.S. Pat. No. 6,686,463, U.S. Pat. No. 6,673,918, U.S. Pat. No. 6,649,751, U.S. Pat. No. 6,989,442, and U.S. Ser. No. 10/190,359, all incorporated by reference herein in their entirety.

[0529] Alternatively, for the one-pot protocol, the polymer-bound trityl-on oligoribonucleotide is transferred to a 4 mL glass screw top vial and suspended in a solution of 33% ethanolic methylamine/DMSO: 1/1 (0.8 mL) at 65° C. for 15 minutes. The vial is brought to room temperature TEA-3HF (0.1 mL) is added and the vial is heated at 65° C. for 15 minutes. The sample is cooled at −20° C. and then quenched with 1.5 M NH₄HCO₃.

[0530] For purification of the trityl-on oligomers, the quenched NH₄HCO₃ solution is loaded onto a C-18 containing cartridge that had been prewashed with acetonitrile followed by 50 mM TEAA. After washing the loaded cartridge with water, the RNA is detritylated with 0.5% TFA for 13 minutes. The cartridge is then washed again with water, salt exchanged with 1 M NaCl and washed with water again. The oligonucleotide is then eluted with 30% acetonitrile.

[0531] The average stepwise coupling yields are typically >98% (Wincott et al., 1995 Nucleic Acids Res. 23, 2677-2684). Those of ordinary skill in the art will recognize that the scale of synthesis can be adapted to be larger or smaller than the example described above including but not limited to 96-well format.

[0532] Alternatively, the nucleic acid molecules of the present invention can be synthesized separately and joined together post-synthetically, for example, by ligation (Moore et al., 1992, Science 256, 9923; Draper et al., International PCT publication No. WO 93/23569; Shabarova et al., 1991, Nucleic Acids Research 19, 4247; Bellon et al., 1997, Nucleosides & Nucleotides, 16, 951; Bellon et al., 1997, Bioconjugate Chem. 8, 204), or by hybridization following synthesis and/or deprotection.

[0533] The siNA molecules of the invention can also be synthesized via a tandem synthesis methodology as described in Example 1 herein, wherein both siNA strands are synthesized as a single contiguous oligonucleotide fragment or strand separated by a cleavable linker which is subsequently cleaved to provide separate siNA fragments or strands that hybridize and permit purification of the siNA duplex. The linker can be a polynucleotide linker or a non-nucleotide linker. The tandem synthesis of siNA as described herein can be readily adapted to both multiwell/multiplate synthesis platforms such as 96 well or similarly larger multi-well platforms. The tandem synthesis of siNA as described herein can also be readily adapted to large scale synthesis platforms employing batch reactors, synthesis columns and the like.

[0534] A siNA molecule can also be assembled from two distinct nucleic acid strands or fragments wherein one fragment includes the sense region and the second fragment includes the antisense region of the RNA molecule.

[0535] The nucleic acid molecules of the present invention can be modified extensively to enhance stability by modification with nuclease resistant groups, for example, 2′-amino, 2′-C-allyl, 2′-fluoro, 2′-O-methyl, 2′-H (for a review see Usman and Cedergren, 1992, TIBS 17, 34; Usman et al., 1994, Nucleic Acids Symp. Ser. 31, 163). siNA constructs can be purified by gel electrophoresis using general methods or can be purified by high pressure liquid chromatography (HPLC; see Wincott et al., supra, the totality of which is hereby incorporated herein by reference) and re-suspended in water.

[0536] In another aspect of the invention, siNA molecules of the invention are expressed from transcription units inserted into DNA or RNA vectors. The recombinant vectors can be DNA plasmids or viral vectors. siNA expressing viral vectors can be constructed based on, but not limited to, adeno-associated virus, retrovirus, adenovirus, or alphavirus. The recombinant vectors capable of expressing the siNA molecules can be delivered as described herein, and persist in target cells. Alternatively, viral vectors can be used that provide for transient expression of siNA molecules.

### Optimizing Activity of the Nucleic Acid Molecule of the Invention.

[0537] Chemically synthesizing nucleic acid molecules with modifications (base, sugar and/or phosphate) can prevent their degradation by serum ribonucleases, which can increase their potency (see e.g., Eckstein et al., International Publication No. WO 92/07065; Perrault et al., 1990 Nature 344, 565; Pieken et al., 1991, Science 253, 314; Usman and Cedergren, 1992, Trends in Biochem. Sci. 17, 334; Usman et al., International Publication No. WO 93/15187; and Rossi et al., International Publication No. WO 91/03162; Sproat, U.S. Pat. No. 5,334,711; Gold et al., U.S. Pat. No. 6,300,074; and Burgin et al., supra; all of which are incorporated by reference herein). All of the above references describe various chemical modifications that can be made to the base, phosphate and/or sugar moieties of the nucleic acid molecules described herein. Modifications that enhance their efficacy in cells, and removal of bases from nucleic acid molecules to shorten oligonucleotide synthesis times and reduce chemical requirements are desired.

[0538] There are several examples in the art describing sugar, base and phosphate modifications that can be introduced into nucleic acid molecules with significant enhancement in their nuclease stability and efficacy. For example, oligonucleotides are modified to enhance stability and/or enhance biological activity by modification with nuclease resistant groups, for example, 2′-amino, 2′-C-allyl, 2′-fluoro, 2′-O-methyl, 2′-O-allyl, 2′-H, nucleotide base modifications (for a review see Usman and Cedergren, 1992, TIBS. 17, 34; Usman et al., 1994, Nucleic Acids Symp. Ser. 31, 163; Burgin et al., 1996, Biochemistry, 35, 14090). Sugar modification of nucleic acid molecules have been extensively described in the art (see Eckstein et al., International Publication PCT No. WO 92/07065; Perrault et al. Nature, 1990, 344, 565-568; Pieken et al. Science, 1991, 253, 314-317; Usman and Cedergren, Trends in Biochem. Sci., 1992, 17, 334-339; Usman et al. International Publication PCT No. WO 93/15187; Sproat, U.S. Pat. No. 5,334,711 and Beigelman et al., 1995, J. Biol. Chem., 270, 25702; Beigelman et al., International PCT publication No. WO 97/26270; Beigelman et al., U.S. Pat. No. 5,716,824; Usman et al., U.S. Pat. No. 5,627,053; Woolf et al., International PCT Publication No. WO 98/13526; Thompson et al., U.S. Ser. No. 60/082,404 which was filed on Apr. 20, 1998; Karpeisky et al., 1998, Tetrahedron Lett., 39, 1131; Earnshaw and Gait, 1998, Biopolymers (Nucleic Acid Sciences), 48, 39-55; Verma and Eckstein, 1998, Annu. Rev. Biochem., 67, 99-134; and Burlina et al., 1997, Bioorg. Med. Chem., 5, 1999-2010; all of the references are hereby incorporated in their totality by reference herein). Such publications describe general methods and strategies to determine the location of incorporation of sugar, base and/or phosphate modifications and the like into nucleic acid molecules without modulating catalysis, and are incorporated by reference herein. In view of such teachings, similar modifications can be used as described herein to modify the siNA nucleic acid molecules of the instant invention so long as the ability of siNA to promote RNAi is cells is not significantly inhibited.

[0539] In one embodiment, a nucleic acid molecule of the invention is chemically modified as described in US 20050020521, incorporated by reference herein in its entirety.

[0540] While chemical modification of oligonucleotide internucleotide linkages with phosphorothioate, phosphorodithioate, and/or 5′-methylphosphonate linkages improves stability, excessive modifications can cause some toxicity or decreased activity. Therefore, when designing nucleic acid molecules, the amount of these internucleotide linkages should be minimized. The reduction in the concentration of these linkages should lower toxicity, resulting in increased efficacy and higher specificity of these molecules.

[0541] Short interfering nucleic acid (siNA) molecules having chemical modifications that maintain or enhance activity are provided. Such a nucleic acid is also generally more resistant to nucleases than an unmodified nucleic acid. Accordingly, the in vitro and/or in vivo activity should not be significantly lowered. In cases in which modulation is the goal, therapeutic nucleic acid molecules delivered exogenously should optimally be stable within cells until translation of the target RNA has been modulated long enough to reduce the levels of the undesirable protein. This period of time varies between hours to days depending upon the disease state. Improvements in the chemical synthesis of RNA and DNA (Wincott et al., 1995, Nucleic Acids Res. 23, 2677; Caruthers et al., 1992, Methods in Enzymology 211, 3-19 (incorporated by reference herein)) have expanded the ability to modify nucleic acid molecules by introducing nucleotide modifications to enhance their nuclease stability, as described above.

[0542] In one embodiment, nucleic acid molecules of the invention include one or more (e.g., about 1, 2, 3, 4, 5, 6, 7, 8, 9, 10, or more) G-clamp nucleotides. A G-clamp nucleotide is a modified cytosine analog wherein the modifications confer the ability to hydrogen bond both Watson-Crick and Hoogsteen faces of a complementary guanine within a duplex, see for example Lin and Matteucci, 1998, J. Am. Chem. Soc., 120, 8531-8532. A single G-clamp analog substitution within an oligonucleotide can result in substantially enhanced helical thermal stability and mismatch discrimination when hybridized to complementary oligonucleotides. The inclusion of such nucleotides in nucleic acid molecules of the invention results in both enhanced affinity and specificity to nucleic acid targets, complementary sequences, or template strands. In another embodiment, nucleic acid molecules of the invention include one or more (e.g., about 1, 2, 3, 4, 5, 6, 7, 8, 9, 10, or more) LNA “locked nucleic acid” nucleotides such as a 2′,4′-C methylene bicyclo nucleotide (see for example Wengel et al., International PCT Publication No. WO 00/66604 and WO 99/14226).

[0543] In another embodiment, the invention features conjugates and/or complexes of siNA molecules of the invention. Such conjugates and/or complexes can be used to facilitate delivery of siNA molecules into a biological system, such as a cell. The conjugates and complexes provided by the instant invention can impart therapeutic activity by transferring therapeutic compounds across cellular membranes, altering the pharmacokinetics, and/or modulating the localization of nucleic acid molecules of the invention. The present invention encompasses the design and synthesis of novel conjugates and complexes for the delivery of molecules, including, but not limited to, small molecules, lipids, cholesterol, phospholipids, nucleosides, nucleotides, nucleic acids, antibodies, toxins, negatively charged polymers and other polymers, for example proteins, peptides, hormones, carbohydrates, polyethylene glycols, or polyamines, across cellular membranes. In general, the transporters described are designed to be used either individually or as part of a multi-component system, with or without degradable linkers. These compounds are expected to improve delivery and/or localization of nucleic acid molecules of the invention into a number of cell types originating from different tissues, in the presence or absence of serum (see Sullenger and Cech, U.S. Pat. No. 5,854,038). Conjugates of the molecules described herein can be attached to biologically active molecules via linkers that are biodegradable, such as biodegradable nucleic acid linker molecules.

[0544] The term “biodegradable linker” as used herein, refers to a nucleic acid or non-nucleic acid linker molecule that is designed as a biodegradable linker to connect one molecule to another molecule, for example, a biologically active molecule to a siNA molecule of the invention or the sense and antisense strands of a siNA molecule of the invention. The biodegradable linker is designed such that its stability can be modulated for a particular purpose, such as delivery to a particular tissue or cell type. The stability of a nucleic acid-based biodegradable linker molecule can be modulated by using various chemistries, for example combinations of ribonucleotides, deoxyribonucleotides, and chemically-modified nucleotides, such as 2′-O-methyl, 2′-fluoro, 2′-amino, 2′-O-amino, 2′-C-allyl, 2′-O-allyl, and other 2′-modified or base modified nucleotides. The biodegradable nucleic acid linker molecule can be a dimer, trimer, tetramer or longer nucleic acid molecule, for example, an oligonucleotide of about 2, 3, 4, 5, 6, 7, 8, 9, 10, 11, 12, 13, 14, 15, 16, 17, 18, 19, or 20 nucleotides in length, or can comprise a single nucleotide with a phosphorus-based linkage, for example, a phosphoramidate or phosphodiester linkage. The biodegradable nucleic acid linker molecule can also comprise nucleic acid backbone, nucleic acid sugar, or nucleic acid base modifications.

[0545] The term “biodegradable” as used herein, refers to degradation in a biological system, for example, enzymatic degradation or chemical degradation.

[0546] The term “biologically active molecule” as used herein refers to compounds or molecules that are capable of eliciting or modifying a biological response in a system. Non-limiting examples of biologically active siNA molecules either alone or in combination with other molecules contemplated by the instant invention include therapeutically active molecules such as antibodies, cholesterol, hormones, antivirals, peptides, proteins, chemotherapeutics, small molecules, vitamins, co-factors, nucleosides, nucleotides, oligonucleotides, enzymatic nucleic acids, antisense nucleic acids, triplex forming oligonucleotides, 2,5-A chimeras, siNA, dsRNA, allozymes, aptamers, decoys and analogs thereof. Biologically active molecules of the invention also include molecules capable of modulating the pharmacokinetics and/or pharmacodynamics of other biologically active molecules, for example, lipids and polymers such as polyamines, polyamides, polyethylene glycol and other polyethers.

[0547] The term “phospholipid” as used herein, refers to a hydrophobic molecule comprising at least one phosphorus group. For example, a phospholipid can comprise a phosphorus-containing group and saturated or unsaturated alkyl group, optionally substituted with OH, COOH, oxo, amine, or substituted or unsubstituted aryl groups.

[0548] Therapeutic nucleic acid molecules (e.g., siNA molecules) delivered exogenously optimally are stable within cells until reverse transcription of the RNA has been modulated long enough to reduce the levels of the RNA transcript. The nucleic acid molecules are resistant to nucleases in order to function as effective intracellular therapeutic agents. Improvements in the chemical synthesis of nucleic acid molecules described in the instant invention and in the art have expanded the ability to modify nucleic acid molecules by introducing nucleotide modifications to enhance their nuclease stability as described above.

[0549] In yet another embodiment, siNA molecules having chemical modifications that maintain or enhance enzymatic activity of proteins involved in RNAi are provided. Such nucleic acids are also generally more resistant to nucleases than unmodified nucleic acids. Thus, in vitro and/or in vivo the activity should not be significantly lowered.

[0550] Use of the nucleic acid-based molecules of the invention will lead to better treatments by affording the possibility of combination therapies (e.g., multiple siNA molecules targeted to different genes; nucleic acid molecules coupled with known small molecule modulators; or intermittent treatment with combinations of molecules, including different motifs and/or other chemical or biological molecules). The treatment of subjects with siNA molecules can also include combinations of different types of nucleic acid molecules, such as enzymatic nucleic acid molecules (ribozymes), allozymes, antisense, 2,5-A oligoadenylate, decoys, and aptamers.

[0551] In another aspect a siNA molecule of the invention comprises one or more 5′ and/or a 3′-cap structure, for example, on only the sense siNA strand, the antisense siNA strand, or both siNA strands.

[0552] By “cap structure” is meant chemical modifications, which have been incorporated at either terminus of the oligonucleotide (see, for example, Adamic et al., U.S. Pat. No. 5,998,203, incorporated by reference herein). These terminal modifications protect the nucleic acid molecule from exonuclease degradation, and may help in delivery and/or localization within a cell. The cap may be present at the 5′-terminus (5′-cap) or at the 3′-terminal (3′-cap) or may be present on both termini. In non-limiting examples, the 5′-cap includes, but is not limited to, glyceryl, inverted deoxy abasic residue (moiety); 4′,5′-methylene nucleotide; 1-(beta-D-erythrofuranosyl) nucleotide, 4′-thio nucleotide; carbocyclic nucleotide; 1,5-anhydrohexitol nucleotide; L-nucleotides; alpha-nucleotides; modified base nucleotide; phosphorodithioate linkage; threo-pentofuranosyl nucleotide; acyclic 3′,4′-seco nucleotide; acyclic 3,4-dihydroxybutyl nucleotide; acyclic 3,5-dihydroxypentyl nucleotide, 3′-3′-inverted nucleotide moiety; 3′-3′-inverted abasic moiety; 3′-2′-inverted nucleotide moiety; 3′-2′-inverted abasic moiety; 1,4-butanediol phosphate; 3′-phosphoramidate; hexylphosphate; aminohexyl phosphate; 3′-phosphate; 3′-phosphorothioate; phosphorodithioate; or bridging or non-bridging methylphosphonate moiety. Non-limiting examples of cap moieties are shown in FIG. 10.

[0553] Non-limiting examples of the 3′-cap include, but are not limited to, glyceryl, inverted deoxy abasic residue (moiety), 4′,5′-methylene nucleotide; 1-(beta-D-erythrofuranosyl) nucleotide; 4′-thio nucleotide, carbocyclic nucleotide; 5′-amino-alkyl phosphate; 1,3-diamino-2-propyl phosphate; 3-aminopropyl phosphate; 6-aminohexyl phosphate; 1,2-aminododecyl phosphate; hydroxypropyl phosphate; 1,5-anhydrohexitol nucleotide; L-nucleotide; alpha-nucleotide; modified base nucleotide; phosphorodithioate; threo-pentofuranosyl nucleotide; acyclic 3′,4′-seco nucleotide; 3,4-dihydroxybutyl nucleotide; 3,5-dihydroxypentyl nucleotide, 5′-5′-inverted nucleotide moiety; 5′-5′-inverted abasic moiety; 5′-phosphoramidate; 5′-phosphorothioate; 1,4-butanediol phosphate; 5′-amino; bridging and/or non-bridging 5′-phosphoramidate, phosphorothioate and/or phosphorodithioate, bridging or non bridging methylphosphonate and 5′-mercapto moieties (for more details see Beaucage and Iyer, 1993, Tetrahedron 49, 1925; incorporated by reference herein).

[0554] By the term “non-nucleotide” is meant any group or compound which can be incorporated into a nucleic acid chain in the place of one or more nucleotide units, including either sugar and/or phosphate substitutions, and allows the remaining bases to exhibit their enzymatic activity. The group or compound is abasic in that it does not contain a commonly recognized nucleotide base, such as adenosine, guanine, cytosine, uracil or thymine and therefore lacks a base at the 1′-position.

[0555] An “alkyl” group refers to a saturated aliphatic hydrocarbon, including straight-chain, branched-chain, and cyclic alkyl groups. Preferably, the alkyl group has 1 to 12 carbons. More preferably, it is a lower alkyl of from 1 to 7 carbons, more preferably 1 to 4 carbons. The alkyl group can be substituted or unsubstituted. When substituted the substituted group(s) is preferably, hydroxyl, cyano, alkoxy, ═O, ═S, NO₂ or N(CH₃)₂, amino, or SH. The term also includes alkenyl groups that are unsaturated hydrocarbon groups containing at least one carbon-carbon double bond, including straight-chain, branched-chain, and cyclic groups. Preferably, the alkenyl group has 1 to 12 carbons. More preferably, it is a lower alkenyl of from 1 to 7 carbons, more preferably 1 to 4 carbons. The alkenyl group may be substituted or unsubstituted. When substituted the substituted group(s) is preferably, hydroxyl, cyano, alkoxy, ═O, ═S, NO₂, halogen, N(CH₃)₂, amino, or SH. The term “alkyl” also includes alkynyl groups that have an unsaturated hydrocarbon group containing at least one carbon-carbon triple bond, including straight-chain, branched-chain, and cyclic groups. Preferably, the alkynyl group has 1 to 12 carbons. More preferably, it is a lower alkynyl of from 1 to 7 carbons, more preferably 1 to 4 carbons. The alkynyl group may be substituted or unsubstituted. When substituted the substituted group(s) is preferably, hydroxyl, cyano, alkoxy, ═O, ═S, NO₂ or N(CH₃)₂, amino or SH.

[0556] Such alkyl groups can also include aryl, alkylaryl, carbocyclic aryl, heterocyclic aryl, amide and ester groups. An “aryl” group refers to an aromatic group that has at least one ring having a conjugated pi electron system and includes carbocyclic aryl, heterocyclic aryl and biaryl groups, all of which may be optionally substituted. The preferred substituent(s) of aryl groups are halogen, trihalomethyl, hydroxyl, SH, OH, cyano, alkoxy, alkyl, alkenyl, alkynyl, and amino groups. An “alkylaryl” group refers to an alkyl group (as described above) covalently joined to an aryl group (as described above). Carbocyclic aryl groups are groups wherein the ring atoms on the aromatic ring are all carbon atoms. The carbon atoms are optionally substituted. Heterocyclic aryl groups are groups having from 1 to 3 heteroatoms as ring atoms in the aromatic ring and the remainder of the ring atoms are carbon atoms. Suitable heteroatoms include oxygen, sulfur, and nitrogen, and include furanyl, thienyl, pyridyl, pyrrolyl, N-lower alkyl pyrrolo, pyrimidyl, pyrazinyl, imidazolyl and the like, all optionally substituted. An “amide” refers to an —C(O)—NH—R, where R is either alkyl, aryl, alkylaryl or hydrogen. An “ester” refers to an —C(O)—OR′, where R is either alkyl, aryl, alkylaryl or hydrogen.

[0557] By “nucleotide” as used herein is as recognized in the art to include natural bases (standard), and modified bases well known in the art. Such bases are generally located at the 1′ position of a nucleotide sugar moiety. Nucleotides generally comprise a base, sugar and a phosphate group. The nucleotides can be unmodified or modified at the sugar, phosphate and/or base moiety, (also referred to interchangeably as nucleotide analogs, modified nucleotides, non-natural nucleotides, non-standard nucleotides and other; see, for example, Usman and McSwiggen, supra; Eckstein et al., International PCT Publication No. WO 92/07065; Usman et al., International PCT Publication No. WO 93/15187; Uhlman & Peyman, supra, all are hereby incorporated by reference herein). There are several examples of modified nucleic acid bases known in the art as summarized by Limbach et al., 1994, Nucleic Acids Res. 22, 2183. Some of the non-limiting examples of base modifications that can be introduced into nucleic acid molecules include, inosine, purine, pyridin-4-one, pyridin-2-one, phenyl, pseudouracil, 2,4,6-trimethoxy benzene, 3-methyl uracil, dihydrouridine, naphthyl, aminophenyl, 5-alkylcytidines (e.g., 5-methylcytidine), 5-alkyluridines (e.g., ribothymidine), 5-halouridine (e.g., 5-bromouridine) or 6-azapyrimidines or 6-alkylpyrimidines (e.g. 6-methyluridine), propyne, and others (Burgin et al., 1996, Biochemistry, 35, 14090; Uhlman & Peyman, supra). By “modified bases” in this aspect is meant nucleotide bases other than adenine, guanine, cytosine and uracil at 1′ position or their equivalents.

[0558] In one embodiment, the invention features modified siNA molecules, with phosphate backbone modifications comprising one or more phosphorothioate, phosphorodithioate, methylphosphonate, phosphotriester, morpholino, amidate carbamate, carboxymethyl, acetamidate, polyamide, sulfonate, sulfonamide, sulfamate, formacetal, thioformacetal, and/or alkylsilyl, substitutions. For a review of oligonucleotide backbone modifications, see Hunziker and Leumann, 1995, Nucleic Acid Analogues: Synthesis and Properties, in Modern Synthetic Methods, VCH, 331417, and Mesmaeker et al., 1994, Novel Backbone Replacements for Oligonucleotides, in Carbohydrate Modifications in Antisense Research, ACS, 24-39.

[0559] By “abasic” is meant sugar moieties lacking a nucleobase or having a hydrogen atom (H) or other non-nucleobase chemical groups in place of a nucleobase at the 1′ position of the sugar moiety, see for example Adamic et al., U.S. Pat. No. 5,998,203. In one embodiment, an abasic moiety of the invention is a ribose, deoxyribose, or dideoxyribose sugar.

[0560] By “unmodified nucleoside” is meant one of the bases adenine, cytosine, guanine, thymine, or uracil joined to the 1′ carbon of β-D-ribo-furanose.

[0561] By “modified nucleoside” is meant any nucleotide base which contains a modification in the chemical structure of an unmodified nucleotide base, sugar and/or phosphate. Non-limiting examples of modified nucleotides are shown by Formulae I-VII and/or other modifications described herein.

[0562] In connection with 2′-modified nucleotides as described for the present invention, by “amino” is meant 2′-NH₂ or 2′-O—NH₂, which can be modified or unmodified. Such modified groups are described, for example, in Eckstein et al., U.S. Pat. No. 5,672,695 and Matulic-Adamic et al., U.S. Pat. No. 6,248,878, which are both incorporated by reference in their entireties.

[0563] Various modifications to nucleic acid siNA structure can be made to enhance the utility of these molecules. Such modifications will enhance shelf-life, half-life in vitro, stability, and ease of introduction of such oligonucleotides to the target site, e.g., to enhance penetration of cellular membranes, and confer the ability to recognize and bind to targeted cells.

### Administration of Nucleic Acid Molecules

[0564] A siNA molecule of the invention can be adapted for use to prevent or treat diseases, traits, disorders, and/or conditions described herein or otherwise known in the art to be related to SREBP1 gene or SREBP1 pathway gene expression, and/or any other trait, disease, disorder or condition that is related to or will respond to the levels of SREBP1 polynucleotides or proteins expressed therefrom in a cell or tissue, alone or in combination with other therapies. In one embodiment, the siNA molecules of the invention and formulations or compositions thereof are administered to a cell, subject, or organism as is described herein and as is generally known in the art.

[0565] In one embodiment, a siNA composition of the invention can comprise a delivery vehicle, including liposomes, for administration to a subject, carriers and diluents and their salts, and/or can be present in pharmaceutically acceptable formulations. Methods for the delivery of nucleic acid molecules are described in Akhtar et al., 1992, Trends Cell Bio., 2, 139; Delivery Strategies for Antisense Oligonucleotide Therapeutics, ed. Akhtar, 1995, Maurer et al., 1999, Mol. Membr. Biol., 16, 129-140; Hofland and Huang, 1999, Handb. Exp. Pharmacol., 137, 165-192; and Lee et al., 2000, ACS Symp. Ser., 752, 184-192, all of which are incorporated herein by reference. Beigelman et al., U.S. Pat. No. 6,395,713 and Sullivan et al., PCT WO 94/02595 further describe the general methods for delivery of nucleic acid molecules. These protocols can be utilized for the delivery of virtually any nucleic acid molecule. Nucleic acid molecules can be administered to cells by a variety of methods known to those of skill in the art, including, but not restricted to, encapsulation in liposomes, by iontophoresis, or by incorporation into other vehicles, such as biodegradable polymers, hydrogels, cyclodextrins (see for example Gonzalez et al., 1999, Bioconjugate Chem., 10, 1068-1074; Wang et al., International PCT publication Nos. WO 03/47518 and WO 03/46185), poly(lactic-co-glycolic)acid (PLGA) and PLCA microspheres (see for example U.S. Pat. No. 6,447,796 and US Patent Application Publication No. US 2002130430), biodegradable nanocapsules, and bioadhesive microspheres, or by proteinaceous vectors (O'Hare and Normand, International PCT Publication No. WO 00/53722). In another embodiment, the nucleic acid molecules of the invention can also be formulated or complexed with polyethyleneimine and derivatives thereof, such as polyethyleneimine-polyethyleneglycol-N-acetylgalactosamine (PEI-PEG-GAL) or polyethyleneimine-polyethyleneglycol-tri-N-acetylgalactosamine (PEI-PEG-triGAL) derivatives. In one embodiment, the nucleic acid molecules of the invention are formulated as described in United States Patent Application Publication No. 20030077829, incorporated by reference herein in its entirety.

[0566] In one embodiment, a siNA molecule of the invention is formulated as a composition described in U.S. Provisional patent application No. 60/678,531 and in related U.S. Provisional patent application No. 60/703,946, filed Jul. 29, 2005, U.S. Provisional patent application No. 60/737,024, filed Nov. 15, 2005, and U.S. Ser. No. 11/353,630, filed Feb. 14, 2006 (Vargeese et al.), all of which are incorporated by reference herein in their entirety. Such siNA formulations are generally referred to as “lipid nucleic acid particles” (LNP). In one embodiment, a siNA molecule of the invention is formulated with one or more LNP compositions described herein in Table IV (see U.S. Ser. No. 11/353,630 supra).

[0567] In one embodiment, the siNA molecules of the invention and formulations or compositions thereof are administered to lung tissues and cells as is described in US 2006/0062758; US 2006/0014289; and US 2004/0077540.

[0568] In one embodiment, a siNA molecule of the invention is complexed with membrane disruptive agents such as those described in U.S. Patent Application Publication No. 20010007666, incorporated by reference herein in its entirety including the drawings. In another embodiment, the membrane disruptive agent or agents and the siNA molecule are also complexed with a cationic lipid or helper lipid molecule, such as those lipids described in U.S. Pat. No. 6,235,310, incorporated by reference herein in its entirety including the drawings.

[0569] In one embodiment, a siNA molecule of the invention is complexed with delivery systems as described in U.S. Patent Application Publication No. 2003077829 and International PCT Publication Nos. WO 00/03683 and WO 02/087541, all incorporated by reference herein in their entirety including the drawings.

[0570] In one embodiment, a siNA molecule of the invention is complexed with delivery systems as is generally described in U.S. Patent Application Publication Nos. US-20050287551; US-20050164220; US-20050191627; US-20050118594; US-20050153919; US-20050085486; and US-20030158133; all incorporated by reference herein in their entirety including the drawings.

[0571] In one embodiment, the nucleic acid molecules of the invention and formulations thereof (e.g., LNP formulations of double stranded nucleic acid molecules of the invention) are administered via pulmonary delivery, such as by inhalation of an aerosol or spray dried formulation administered by an inhalation device or nebulizer, providing rapid local uptake of the nucleic acid molecules into relevant pulmonary tissues. Solid particulate compositions containing respirable dry particles of micronized nucleic acid compositions can be prepared by grinding dried or lyophilized nucleic acid compositions, and then passing the micronized composition through, for example, a 400 mesh screen to break up or separate out large agglomerates. A solid particulate composition comprising the nucleic acid compositions of the invention can optionally contain a dispersant which serves to facilitate the formation of an aerosol as well as other therapeutic compounds. A suitable dispersant is lactose, which can be blended with the nucleic acid compound in any suitable ratio, such as a 1 to 1 ratio by weight.

[0572] Aerosols of liquid particles comprising a nucleic acid composition of the invention can be produced by any suitable means, such as with a nebulizer (see for example U.S. Pat. No. 4,501,729). Nebulizers are commercially available devices which transform solutions or suspensions of an active ingredient into a therapeutic aerosol mist either by means of acceleration of a compressed gas, typically air or oxygen, through a narrow venturi orifice or by means of ultrasonic agitation. Suitable formulations for use in nebulizers comprise the active ingredient in a liquid carrier in an amount of up to 40% w/w preferably less than 20% w/w of the formulation. The carrier is typically water or a dilute aqueous alcoholic solution, preferably made isotonic with body fluids by the addition of, for example, sodium chloride or other suitable salts. Optional additives include preservatives if the formulation is not prepared sterile, for example, methyl hydroxybenzoate, anti-oxidants, flavorings, volatile oils, buffering agents and emulsifiers and other formulation surfactants. The aerosols of solid particles comprising the active composition and surfactant can likewise be produced with any solid particulate aerosol generator. Aerosol generators for administering solid particulate therapeutics to a subject produce particles which are respirable, as explained above, and generate a volume of aerosol containing a predetermined metered dose of a therapeutic composition at a rate suitable for human administration.

[0573] In one embodiment, a solid particulate aerosol generator of the invention is an insufflator. Suitable formulations for administration by insufflation include finely comminuted powders which can be delivered by means of an insufflator. In the insufflator, the powder, e.g., a metered dose thereof effective to carry out the treatments described herein, is contained in capsules or cartridges, typically made of gelatin or plastic, which are either pierced or opened in situ and the powder delivered by air drawn through the device upon inhalation or by means of a manually-operated pump. The powder employed in the insufflator consists either solely of the active ingredient or of a powder blend comprising the active ingredient, a suitable powder diluent, such as lactose, and an optional surfactant. The active ingredient typically comprises from 0.1 to 100 w/w of the formulation. A second type of illustrative aerosol generator comprises a metered dose inhaler. Metered dose inhalers are pressurized aerosol dispensers, typically containing a suspension or solution formulation of the active ingredient in a liquified propellant. During use these devices discharge the formulation through a valve adapted to deliver a metered volume to produce a fine particle spray containing the active ingredient. Suitable propellants include certain chlorofluorocarbon compounds, for example, dichlorodifluoromethane, trichlorofluoromethane, dichlorotetrafluoroethane and mixtures thereof. The formulation can additionally contain one or more co-solvents, for example, ethanol, emulsifiers and other formulation surfactants, such as oleic acid or sorbitan trioleate, anti-oxidants and suitable flavoring agents. Other methods for pulmonary delivery are described in, for example US Patent Application No. 20040037780, and U.S. Pat. Nos. 6,592,904; 6,582,728; 6,565,885, all incorporated by reference herein.

[0574] In one embodiment, the siNA and LNP compositions and formulations provided herein for use in pulmonary delivery further comprise one or more surfactants. Suitable surfactants or surfactant components for enhancing the uptake of the compositions of the invention include synthetic and natural as well as full and truncated forms of surfactant protein A, surfactant protein B, surfactant protein C, surfactant protein D and surfactant Protein E, di-saturated phosphatidylcholine (other than dipalmitoyl), dipalmitoylphosphatidylcholine, phosphatidylcholine, phosphatidylglycerol, phosphatidylinositol, phosphatidylethanolamine, phosphatidylserine; phosphatidic acid, ubiquinones, lysophosphatidylethanolamine, lysophosphatidylcholine, palmitoyl-lysophosphatidylcholine, dehydroepiandrosterone, dolichols, sulfatidic acid, glycerol-3-phosphate, dihydroxyacetone phosphate, glycerol, glycero-3-phosphocholine, dihydroxyacetone, palmitate, cytidine diphosphate (CDP) diacylglycerol, CDP choline, choline, choline phosphate; as well as natural and artificial lamelar bodies which are the natural carrier vehicles for the components of surfactant, omega-3 fatty acids, polyenic acid, polyenoic acid, lecithin, palmitinic acid, non-ionic block copolymers of ethylene or propylene oxides, polyoxypropylene, monomeric and polymeric, polyoxyethylene, monomeric and polymeric, poly (vinyl amine) with dextran and/or alkanoyl side chains, Brij 35, Triton X-100 and synthetic surfactants ALEC, Exosurf, Survan and Atovaquone, among others. These surfactants may be used either as single or part of a multiple component surfactant in a formulation, or as covalently bound additions to the 5′ and/or 3′ ends of the nucleic acid component of a pharmaceutical composition herein.

[0575] The composition of the present invention may be administered into the respiratory system as a formulation including particles of respirable size, e.g. particles of a size sufficiently small to pass through the nose, mouth and larynx upon inhalation and through the bronchi and alveoli of the lungs. In general, respirable particles range from about 0.5 to 10 microns in size. Particles of non-respirable size which are included in the aerosol tend to deposit in the throat and be swallowed, and the quantity of non-respirable particles in the aerosol is thus minimized. For nasal administration, a particle size in the range of 10-500 um is preferred to ensure retention in the nasal cavity.

[0576] In one embodiment, the siNA molecules of the invention and formulations or compositions thereof are administered to the liver as is generally known in the art (see for example Wen et al., 2004, World J Gastroenterol., 10, 244-9; Murao et al., 2002, Pharm Res., 19, 1808-14; Liu et al., 2003, Gene Ther., 10, 180-7; Hong et al., 2003, J Pharm Pharmacol., 54, 51-8; Herrmann et al., 2004, Arch Virol., 149, 1611-7; and Matsuno et al., 2003, Gene Ther., 10, 1559-66).

[0577] In one embodiment, a siNA molecule of the invention is administered iontophoretically, for example to a particular organ or compartment (e.g., the eye, back of the eye, heart, liver, kidney, bladder, prostate, tumor, CNS etc.). Non-limiting examples of iontophoretic delivery are described in, for example, WO 03/043689 and WO 03/030989, which are incorporated by reference in their entireties herein.

[0578] In one embodiment, siNA compounds and compositions of the invention are administered either systemically or locally about every 1-50 weeks (e.g., about every 1, 2, 3, 4, 5, 6, 7, 8, 9, 10, 11, 12, 13, 14, 15, 16, 17, 18, 19, 20, 21, 22, 23, 24, 25, 26, 27, 28, 29, 30, 31, 32, 33, 34, 35, 36, 37, 38, 39, 40, 41, 42, 43, 44, 45, 46, 47, 48, 49, or 50 weeks), alone or in combination with other compounds and/or therapies herein. In one embodiment, siNA compounds and compositions of the invention are administered systemically (e.g., via intravenous, subcutaneous, intramuscular, infusion, pump, implant etc.) about every 1-50 weeks (e.g., about every 1, 2, 3, 4, 5, 6, 7, 8, 9, 10, 11, 12, 13, 14, 15, 16, 17, 18, 19, 20, 21, 22, 23, 24, 25, 26, 27, 28, 29, 30, 31, 32, 33, 34, 35, 36, 37, 38, 39, 40, 41, 42, 43, 44, 45, 46, 47, 48, 49, or 50 weeks), alone or in combination with other compounds and/or therapies described herein and/or otherwise known in the art.

[0579] In one embodiment, delivery systems of the invention include, for example, aqueous and nonaqueous gels, creams, multiple emulsions, microemulsions, liposomes, ointments, aqueous and nonaqueous solutions, lotions, aerosols, hydrocarbon bases and powders, and can contain excipients such as solubilizers, permeation enhancers (e.g., fatty acids, fatty acid esters, fatty alcohols and amino acids), and hydrophilic polymers (e.g., polycarbophil and polyvinylpyrolidone). In one embodiment, the pharmaceutically acceptable carrier is a liposome or a transdermal enhancer. Examples of liposomes which can be used in this invention include the following: (1) CellFectin, 1:1.5 (M/M) liposome formulation of the cationic lipid N,NI,NII,NIII-tetramethyl-N,NI,NII,NIII-tetrapalmit-y-spermine and dioleoyl phosphatidylethanolamine (DOPE) (GIBCO BRL); (2) Cytofectin GSV, 2:1 (M/M) liposome formulation of a cationic lipid and DOPE (Glen Research); (3) DOTAP (N-[1-(2,3-dioleoyloxy)-N,N,N-tri-methyl-ammoniummethylsulfate) (Boehringer Manheim); and (4) Lipofectamine, 3:1 (M/M) liposome formulation of the polycationic lipid DOSPA and the neutral lipid DOPE (GIBCO BRL).

[0580] In one embodiment, delivery systems of the invention include patches, tablets, suppositories, pessaries, gels and creams, and can contain excipients such as solubilizers and enhancers (e.g., propylene glycol, bile salts and amino acids), and other vehicles (e.g., polyethylene glycol, fatty acid esters and derivatives, and hydrophilic polymers such as hydroxypropylmethylcellulose and hyaluronic acid).

[0581] In one embodiment, siNA molecules of the invention are formulated or complexed with polyethylenimine (e.g:, linear or branched PEI) and/or polyethylenimine derivatives, including for example grafted PEIs such as galactose PEI, cholesterol PEI, antibody derivatized PEI, and polyethylene glycol PEI (PEG-PEI) derivatives thereof (see for example Ogris et al., 2001, AAPA Pharm Sci, 3, 1-11; Furgeson et al., 2003, Bioconjugate Chem., 14, 840-847; Kunath et al., 2002, Pharmaceutical Research, 19, 810-817; Choi et al., 2001, Bull. Korean Chem. Soc., 22, 46-52; Bettinger et al., 1999, Bioconjugate Chem., 10, 558-561; Peterson et al., 2002, Bioconjugate Chem., 13, 845-854; Erbacher et al., 1999, Journal of Gene Medicine Preprint, 1, 1-18; Godbey et al., 1999, PNAS USA, 96, 5177-5181; Godbey et al., 1999, Journal of Controlled Release, 60, 149-160; Diebold et al., 1999, Journal of Biological Chemistry, 274, 19087-19094; Thomas and Klibanov, 2002, PNAS USA, 99, 14640-14645; and Sagara, U.S. Pat. No. 6,586,524, incorporated by reference herein.

[0582] In one embodiment, a siNA molecule of the invention comprises a bioconjugate, for example a nucleic acid conjugate as described in Vargeese et al., U.S. Ser. No. 10/427,160, filed Apr. 30, 2003; U.S. Pat. No. 6,528,631; U.S. Pat. No. 6,335,434; U.S. Pat. No. 6,235,886; U.S. Pat. No. 6,153,737; U.S. Pat. No. 5,214,136; U.S. Pat. No. 5,138,045, all incorporated by reference herein.

[0583] Thus, the invention features a pharmaceutical composition comprising one or more nucleic acid(s) of the invention in an acceptable carrier, such as a stabilizer, buffer, and the like. The polynucleotides of the invention can be administered (e.g., RNA, DNA or protein) and introduced to a subject by any standard means, with or without stabilizers, buffers, and the like, to form a pharmaceutical composition. When it is desired to use a liposome delivery mechanism, standard protocols for formation of liposomes can be followed. The compositions of the present invention can also be formulated and used as creams, gels, sprays, oils and other suitable compositions for topical, dermal, or transdermal administration as is known in the art.

[0584] The present invention also includes pharmaceutically acceptable formulations of the compounds described. These formulations include salts of the above compounds, e.g., acid addition salts, for example, salts of hydrochloric, hydrobromic, acetic acid, and benzene sulfonic acid.

[0585] A pharmacological composition or formulation refers to a composition or formulation in a form suitable for administration, e.g., systemic or local administration, into a cell or subject, including for example a human. Suitable forms, in part, depend upon the use or the route of entry, for example oral, transdermal, or by injection. Such forms should not prevent the composition or formulation from reaching a target cell (i.e., a cell to which the negatively charged nucleic acid is desirable for delivery). For example, pharmacological compositions injected into the blood stream should be soluble. Other factors are known in the art, and include considerations such as toxicity and forms that prevent the composition or formulation from exerting its effect.

[0586] In one embodiment, siNA molecules of the invention are administered to a subject by systemic administration in a pharmaceutically acceptable composition or formulation. By “systemic administration” is meant in vivo systemic absorption or accumulation of drugs in the blood stream followed by distribution throughout the entire body. Administration routes that lead to systemic absorption include, without limitation: intravenous, subcutaneous, portal vein, intraperitoneal, inhalation, oral, intrapulmonary and intramuscular. Each of these administration routes exposes the siNA molecules of the invention to an accessible diseased tissue (e.g., lung). The rate of entry of a drug into the circulation has been shown to be a function of molecular weight or size. The use of a liposome or other drug carrier comprising the compounds of the instant invention can potentially localize the drug, for example, in certain tissue types, such as the tissues of the reticular endothelial system (RES). A liposome formulation that can facilitate the association of drug with the surface of cells, such as, lymphocytes and macrophages is also useful. This approach can provide enhanced delivery of the drug to target cells by taking advantage of the specificity of macrophage and lymphocyte immune recognition of abnormal cells.

[0587] By “pharmaceutically acceptable formulation” or “pharmaceutically acceptable composition” is meant, a composition or formulation that allows for the effective distribution of the nucleic acid molecules of the instant invention in the physical location most suitable for their desired activity. Non-limiting examples of agents suitable for formulation with the nucleic acid molecules of the instant invention include: P-glycoprotein inhibitors (such as Pluronic P85); biodegradable polymers, such as poly (DL-lactide-coglycolide) microspheres for sustained release delivery (Emerich, D F et al, 1999, Cell Transplant, 8, 47-58); and loaded nanoparticles, such as those made of polybutylcyanoacrylate. Other non-limiting examples of delivery strategies for the nucleic acid molecules of the instant invention include material described in Boado et al., 1998, J. Pharm. Sci., 87, 1308-1315; Tyler et al., 1999, FEBS Lett., 421, 280-284; Pardridge et al., 1995, PNAS USA., 92, 5592-5596; Boado, 1995, Adv. Drug Delivery Rev., 15, 73-107; Aldrian-Herrada et al., 1998, Nucleic Acids Res., 26, 49104916; and Tyler et al., 1999, PNAS USA., 96, 7053-7058.

[0588] The invention also features the use of a composition comprising surface-modified liposomes containing poly (ethylene glycol) lipids (PEG-modified, or long-circulating liposomes or stealth liposomes) and nucleic acid molecules of the invention. These formulations offer a method for increasing the accumulation of drugs (e.g., siNA) in target tissues. This class of drug carriers resists opsonization and elimination by the mononuclear phagocytic system (MPS or RES), thereby enabling longer blood circulation times and enhanced tissue exposure for the encapsulated drug (Lasic et al. Chem. Rev. 1995, 95, 2601-2627; Ishiwata et al., Chem. Pharm. Bull. 1995, 43, 1005-1011). Such liposomes have been shown to accumulate selectively in tumors, presumably by extravasation and capture in the neovascularized target tissues (Lasic et al., Science 1995, 267, 1275-1276; Oku et al., 1995, Biochim. Biophys. Acta, 1238, 86-90). The long-circulating liposomes enhance the pharmacokinetics and pharmacodynamics of DNA and RNA, particularly compared to conventional cationic liposomes which are known to accumulate in tissues of the MPS (Liu et al., J. Biol. Chem. 1995, 42, 24864-24870; Choi et al., International PCT Publication No. WO 96/10391; Ansell et al., International PCT Publication No. WO 96/10390; Holland et al., International PCT Publication No. WO 96/10392). Long-circulating liposomes are also likely to protect drugs from nuclease degradation to a greater extent compared to cationic liposomes, based on their ability to avoid accumulation in metabolically aggressive MPS tissues such as the liver and spleen.

[0589] In one embodiment, a liposomal formulation of the invention comprises a double stranded nucleic acid molecule of the invention (e.g, siNA) formulated or complexed with compounds and compositions described in U.S. Pat. Nos. 6,858,224; 6,534,484; 6,287,591; 6,835,395; 6,586,410; 6,858,225; 6,815,432; U.S. Pat. Nos. 6,586,001; 6,120,798; U.S. Pat. No. 6,977,223; U.S. Pat. Nos. 6,998,115; 5,981,501; 5,976,567; 5,705,385; US 2006/0019912; US 2006/0019258; US 2006/0008909; US 2005/0255153; US 2005/0079212; US 2005/0008689; US 2003/0077829, US 2005/0064595, US 2005/0175682, US 2005/0118253; US 2004/0071654; US 2005/0244504; US 2005/0265961 and US 2003/0077829, all of which are incorporated by reference herein in their entirety.

[0590] The present invention also includes compositions prepared for storage or administration that include a pharmaceutically effective amount of the desired compounds in a pharmaceutically acceptable carrier or diluent. Acceptable carriers or diluents for therapeutic use are well known in the pharmaceutical art, and are described, for example, in Remington's Pharmaceutical Sciences, Mack Publishing Co. (A. R. Gennaro edit. 1985), hereby incorporated by reference herein. For example, preservatives, stabilizers, dyes and flavoring agents can be provided. These include sodium benzoate, sorbic acid and esters of p-hydroxybenzoic acid. In addition, antioxidants and suspending agents can be used.

[0591] A pharmaceutically effective dose is that dose required to prevent, inhibit the occurrence, or treat (alleviate a symptom to some extent, preferably all of the symptoms) of a disease state. The pharmaceutically effective dose depends on the type of disease, the composition used, the route of administration, the type of mammal being treated, the physical characteristics of the specific mammal under consideration, concurrent medication, and other factors that those skilled in the medical arts will recognize. Generally, an amount between 0.1 mg/kg and 100 mg/kg body weight/day of active ingredients is administered dependent upon potency of the negatively charged polymer.

[0592] The nucleic acid molecules of the invention and formulations thereof can be administered orally, topically, parenterally, by inhalation or spray, or rectally in dosage unit formulations containing conventional non-toxic pharmaceutically acceptable carriers, adjuvants and/or vehicles. The term parenteral as used herein includes percutaneous, subcutaneous, intravascular (e.g., intravenous), intramuscular, or intrathecal injection or infusion techniques and the like. In addition, there is provided a pharmaceutical formulation comprising a nucleic acid molecule of the invention and a pharmaceutically acceptable carrier. One or more nucleic acid molecules of the invention can be present in association with one or more non-toxic pharmaceutically acceptable carriers and/or diluents and/or adjuvants, and if desired other active ingredients. The pharmaceutical compositions containing nucleic acid molecules of the invention can be in a form suitable for oral use, for example, as tablets, troches, lozenges, aqueous or oily suspensions, dispersible powders or granules, emulsion, hard or soft capsules, or syrups or elixirs.

[0593] Compositions intended for oral use can be prepared according to any method known to the art for the manufacture of pharmaceutical compositions and such compositions can contain one or more such sweetening agents, flavoring agents, coloring agents or preservative agents in order to provide pharmaceutically elegant and palatable preparations. Tablets contain the active ingredient in admixture with non-toxic pharmaceutically acceptable excipients that are suitable for the manufacture of tablets. These excipients can be, for example, inert diluents; such as calcium carbonate, sodium carbonate, lactose, calcium phosphate or sodium phosphate; granulating and disintegrating agents, for example, corn starch, or alginic acid; binding agents, for example starch, gelatin or acacia; and lubricating agents, for example magnesium stearate, stearic acid or talc. The tablets can be uncoated or they can be coated by known techniques. In some cases such coatings can be prepared by known techniques to delay disintegration and absorption in the gastrointestinal tract and thereby provide a sustained action over a longer period. For example, a time delay material such as glyceryl monosterate or glyceryl distearate can be employed.

[0594] Formulations for oral use can also be presented as hard gelatin capsules wherein the active ingredient is mixed with an inert solid diluent, for example, calcium carbonate, calcium phosphate or kaolin, or as soft gelatin capsules wherein the active ingredient is mixed with water or an oil medium, for example peanut oil, liquid paraffin or olive oil.

[0595] Aqueous suspensions contain the active materials in a mixture with excipients suitable for the manufacture of aqueous suspensions. Such excipients are suspending agents, for example sodium carboxymethylcellulose, methylcellulose, hydropropyl-methylcellulose, sodium alginate, polyvinylpyrrolidone, gum tragacanth and gum acacia; dispersing or wetting agents can be a naturally-occurring phosphatide, for example, lecithin, or condensation products of an alkylene oxide with fatty acids, for example polyoxyethylene stearate, or condensation products of ethylene oxide with long chain aliphatic alcohols, for example heptadecaethyleneoxycetanol, or condensation products of ethylene oxide with partial esters derived from fatty acids and a hexitol such as polyoxyethylene sorbitol monooleate, or condensation products of ethylene oxide with partial esters derived from fatty acids and hexitol anhydrides, for example polyethylene sorbitan monooleate. The aqueous suspensions can also contain one or more preservatives, for example ethyl, or n-propyl p-hydroxybenzoate, one or more coloring agents, one or more flavoring agents, and one or more sweetening agents, such as sucrose or saccharin.

[0596] Oily suspensions can be formulated by suspending the active ingredients in a vegetable oil, for example arachis oil, olive oil, sesame oil or coconut oil, or in a mineral oil such as liquid paraffin. The oily suspensions can contain a thickening agent, for example beeswax, hard paraffin or cetyl alcohol. Sweetening agents and flavoring agents can be added to provide palatable oral preparations. These compositions can be preserved by the addition of an anti-oxidant such as ascorbic acid

[0597] Dispersible powders and granules suitable for preparation of an aqueous suspension by the addition of water provide the active ingredient in admixture with a dispersing or wetting agent, suspending agent and one or more preservatives. Suitable dispersing or wetting agents or suspending agents are exemplified by those already mentioned above. Additional excipients, for example sweetening, flavoring and coloring agents, can also be present.

[0598] Pharmaceutical compositions of the invention can also be in the form of oil-in-water emulsions. The oily phase can be a vegetable oil or a mineral oil or mixtures of these. Suitable emulsifying agents can be naturally-occurring gums, for example gum acacia or gum tragacanth, naturally-occurring phosphatides, for example soy bean, lecithin, and esters or partial esters derived from fatty acids and hexitol, anhydrides, for example sorbitan monooleate, and condensation products of the said partial esters with ethylene oxide, for example polyoxyethylene sorbitan monooleate. The emulsions can also contain sweetening and flavoring agents.

[0599] Syrups and elixirs can be formulated with sweetening agents, for example glycerol, propylene glycol, sorbitol, glucose or sucrose. Such formulations can also contain a demulcent, a preservative and flavoring and coloring agents. The pharmaceutical compositions can be in the form of a sterile injectable aqueous or oleaginous suspension. This suspension can be formulated according to the known art using those suitable dispersing or wetting agents and suspending agents that have been mentioned above. The sterile injectable preparation can also be a sterile injectable solution or suspension in a non-toxic parentally acceptable diluent or solvent, for example as a solution in 1,3-butanediol. Among the acceptable vehicles and solvents that can be employed are water, Ringer's solution and isotonic sodium chloride solution. In addition, sterile, fixed oils are conventionally employed as a solvent or suspending medium. For this purpose, any bland fixed oil can be employed including synthetic mono- or diglycerides. In addition, fatty acids such as oleic acid find use in the preparation of injectables.

[0600] The nucleic acid molecules of the invention can also be administered in the form of suppositories, e.g., for rectal administration of the drug. These compositions can be prepared by mixing the drug with a suitable non-irritating excipient that is solid at ordinary temperatures but liquid at the rectal temperature and will therefore melt in the rectum to release the drug. Such materials include cocoa butter and polyethylene glycols.

[0601] Nucleic acid molecules of the invention can be administered parenterally in a sterile medium. The drug, depending on the vehicle and concentration used, can either be suspended or dissolved in the vehicle. Advantageously, adjuvants such as local anesthetics, preservatives and buffering agents can be dissolved in the vehicle.

[0602] Dosage levels of the order of from about 0.1 mg to about 140 mg per kilogram of body weight per day are useful in the treatment of the above-indicated conditions (about 0.5 mg to about 7 g per subject per day). The amount of active ingredient that can be combined with the carrier materials to produce a single dosage form varies depending upon the host treated and the particular mode of administration. Dosage unit forms generally contain between from about 1 mg to about 500 mg of an active ingredient.

[0603] It is understood that the specific dose level for any particular subject depends upon a variety of factors including the activity of the specific compound employed, the age, body weight, general health, sex, diet, time of administration, route of administration, and rate of excretion, drug combination and the severity of the particular disease undergoing therapy.

[0604] For administration to non-human animals, the composition can also be added to the animal feed or drinking water. It can be convenient to formulate the animal feed and drinking water compositions so that the animal takes in a therapeutically appropriate quantity of the composition along with its diet. It can also be convenient to present the composition as a premix for addition to the feed or drinking water.

[0605] The nucleic acid molecules of the present invention can also be administered to a subject in combination with other therapeutic compounds to increase the overall therapeutic effect. The use of multiple compounds to treat an indication can increase the beneficial effects while reducing the presence of side effects.

[0606] In one embodiment, the invention comprises compositions suitable for administering nucleic acid molecules of the invention to specific cell types. For example, the asialoglycoprotein receptor (ASGPr) (Wu and Wu, 1987, J. Biol. Chem. 262, 4429-4432) is unique to hepatocytes and binds branched galactose-terminal glycoproteins, such as asialoorosomucoid (ASOR). In another example, the folate receptor is overexpressed in many cancer cells. Binding of such glycoproteins, synthetic glycoconjugates, or folates to the receptor takes place with an affinity that strongly depends on the degree of branching of the oligosaccharide chain, for example, triatennary structures are bound with greater affinity than biatenarry or monoatennary chains (Baenziger and Fiete, 1980, Cell, 22, 611-620; Connolly et al., 1982, J. Biol. Chem., 257, 939-945). Lee and Lee, 1987, Glycoconjugate J., 4, 317-328, obtained this high specificity through the use of N-acetyl-D-galactosamine as the carbohydrate moiety, which has higher affinity for the receptor, compared to galactose. This “clustering effect” has also been described for the binding and uptake of mannosyl-terminating glycoproteins or glycoconjugates (Ponpipom et al., 1981, J. Med. Chem., 24, 1388-1395). The use of galactose, galactosamine, or folate based conjugates to transport exogenous compounds across cell membranes can provide a targeted delivery approach to, for example, the treatment of liver disease, cancers of the liver, or other cancers. The use of bioconjugates can also provide a reduction in the required dose of therapeutic compounds required for treatment. Furthermore, therapeutic bioavailability, pharmacodynamics, and pharmacokinetic parameters can be modulated through the use of nucleic acid bioconjugates of the invention. Non-limiting examples of such bioconjugates are described in Vargeese et al., U.S. Ser. No. 10/201,394, filed Aug. 13, 2001; and Matulic-Adamic et al., U.S. Ser. No. 60/362,016, filed Mar. 6, 2002.

[0607] Alternatively, certain siNA molecules of the instant invention can be expressed within cells from eukaryotic promoters (e.g., Izant and Weintraub, 1985, Science, 229, 345; McGarry and Lindquist, 1986, Proc. Natl. Acad. Sci., USA 83, 399; Scanlon et al., 1991, Proc. Natl. Acad. Sci. USA, 88, 10591-5; Kashani-Sabet et al., 1992, Antisense Res. Dev., 2, 3-15; Dropulic et al., 1992, J. Virol., 66, 1432-41; Weerasinghe et al., 1991, J. Virol., 65, 5531-4; Ojwang et al., 1992, Proc. Natl. Acad. Sci. USA, 89, 10802-6; Chen et al., 1992, Nucleic Acids Res., 20, 4581-9; Sarver et al., 1990 Science, 247, 1222-1225; Thompson et al., 1995, Nucleic Acids Res., 23, 2259; Good et al., 1997, Gene Therapy, 4, 45. Those skilled in the art realize that any nucleic acid can be expressed in eukaryotic cells from the appropriate DNA/RNA vector. The activity of such nucleic acids can be augmented by their release from the primary transcript by a enzymatic nucleic acid (Draper et al., PCT WO 93/23569, and Sullivan et al., PCT WO 94/02595; Ohkawa et al., 1992, Nucleic Acids Symp. Ser., 27, 15-6; Taira et al., 1991, Nucleic Acids Res., 19, 5125-30; Ventura et al., 1993, Nucleic Acids Res., 21, 3249-55; Chowrira et al., 1994, J. Biol. Chem., 269, 25856.

[0608] In another aspect of the invention, RNA molecules of the present invention can be expressed from transcription units (see for example Couture et al., 1996, TIG., 12, 510) inserted into DNA or RNA vectors. The recombinant vectors can be DNA plasmids or viral vectors. siNA expressing viral vectors can be constructed based on, but not limited to, adeno-associated virus, retrovirus, adenovirus, or alphavirus. In another embodiment, pol III based constructs are used to express nucleic acid molecules of the invention (see for example Thompson, U.S. Pats. Nos. 5,902,880 and 6,146,886). The recombinant vectors capable of expressing the siNA molecules can be delivered as described above, and persist in target cells. Alternatively, viral vectors can be used that provide for transient expression of nucleic acid molecules. Such vectors can be repeatedly administered as necessary. Once expressed, the siNA molecule interacts with the target mRNA and generates an RNAi response. Delivery of siNA molecule expressing vectors can be systemic, such as by intravenous or intramuscular administration, by administration to target cells ex-planted from a subject followed by reintroduction into the subject, or by any other means that would allow for introduction into the desired target cell (for a review see Couture et al., 1996, TIG., 12, 510).

[0609] In one aspect the invention features an expression vector comprising a nucleic acid sequence encoding at least one siNA molecule of the instant invention. The expression vector can encode one or both strands of a siNA duplex, or a single self-complementary strand that self hybridizes into a siNA duplex. The nucleic acid sequences encoding the siNA molecules of the instant invention can be operably linked in a manner that allows expression of the siNA molecule (see for example Paul et al., 2002, Nature Biotechnology, 19, 505; Miyagishi and Taira, 2002, Nature Biotechnology, 19, 497; Lee et al., 2002, Nature Biotechnology, 19, 500; and Novina et al., 2002, Nature Medicine, advance online publication doi:10.1038/nm725).

[0610] In another aspect, the invention features an expression vector comprising: a) a transcription initiation region (e.g., eukaryotic pol I, II or III initiation region); b) a transcription termination region (e.g., eukaryotic pol I, II or III termination region); and c) a nucleic acid sequence encoding at least one of the siNA molecules of the instant invention, wherein said sequence is operably linked to said initiation region and said termination region in a manner that allows expression and/or delivery of the siNA molecule. The vector can optionally include an open reading frame (ORF) for a protein operably linked on the 5′ side or the 3′-side of the sequence encoding the siNA of the invention; and/or an intron (intervening sequences).

[0611] Transcription of the siNA molecule sequences can be driven from a promoter for eukaryotic RNA polymerase I (pol I), RNA polymerase II (pol II), or RNA polymerase III (pol III). Transcripts from pol II or pol III promoters are expressed at high levels in all cells; the levels of a given pol II promoter in a given cell type depends on the nature of the gene regulatory sequences (enhancers, silencers, etc.) present nearby. Prokaryotic RNA polymerase promoters are also used, providing that the prokaryotic RNA polymerase enzyme is expressed in the appropriate cells (Elroy-Stein and Moss, 1990, Proc. Natl. Acad. Sci. USA, 87, 6743-7; Gao and Huang 1993, Nucleic Acids Res., 21, 2867-72; Lieber et al., 1993, Methods Enzymol., 217, 47-66; Zhou et al., 1990, Mol. Cell. Biol., 10, 4529-37). Several investigators have demonstrated that nucleic acid molecules expressed from such promoters can function in mammalian cells (e.g. Kashani-Sabet et al., 1992, Antisense Res. Dev., 2, 3-15; Ojwang et al., 1992, Proc. Natl. Acad. Sci. USA, 89, 10802-6; Chen et al., 1992, Nucleic Acids Res., 20, 4581-9; Yu et al., 1993, Proc. Natl. Acad. Sci. USA, 90, 6340-4; L'Huillier et al., 1992, EMBO J., 11, 4411-8; Lisziewicz et al., 1993, Proc. Natl. Acad. Sci. U.S.A., 90, 8000-4; Thompson et al., 1995, Nucleic Acids Res., 23, 2259; Sullenger & Cech, 1993, Science, 262, 1566). More specifically, transcription units such as the ones derived from genes encoding U6 small nuclear (snRNA), transfer RNA (tRNA) and adenovirus VA RNA are useful in generating high concentrations of desired RNA molecules such as siNA in cells (Thompson et al., supra; Couture and Stinchcomb, 1996, supra; Noonberg et al., 1994, Nucleic Acid Res., 22, 2830; Noonberg et al., U.S. Pat. No. 5,624,803; Good et al., 1997, Gene Ther., 4, 45; Beigelman et al., International PCT Publication No. WO 96/18736. The above siNA transcription units can be incorporated into a variety of vectors for introduction into mammalian cells, including but not restricted to, plasmid DNA vectors, viral DNA vectors (such as adenovirus or adeno-associated virus vectors), or viral RNA vectors (such as retroviral or alphavirus vectors) (for a review see Couture and Stinchcomb, 1996, supra).

[0612] In another aspect the invention features an expression vector comprising a nucleic acid sequence encoding at least one of the siNA molecules of the invention in a manner that allows expression of that siNA molecule. The expression vector comprises in one embodiment; a) a transcription initiation region; b) a transcription termination region; and c) a nucleic acid sequence encoding at least one strand of the siNA molecule, wherein the sequence is operably linked to the initiation region and the termination region in a manner that allows expression and/or delivery of the siNA molecule.

[0613] In another embodiment the expression vector comprises: a) a transcription initiation region; b) a transcription termination region; c) an open reading frame; and d) a nucleic acid sequence encoding at least one strand of a siNA molecule, wherein the sequence is operably linked to the 3′-end of the open reading frame and wherein the sequence is operably linked to the initiation region, the open reading frame and the termination region in a manner that allows expression and/or delivery of the siNA molecule. In yet another embodiment, the expression vector comprises: a) a transcription initiation region; b) a transcription termination region; c) an intron; and d) a nucleic acid sequence encoding at least one siNA molecule, wherein the sequence is operably linked to the initiation region, the intron and the termination region in a manner which allows expression and/or delivery of the nucleic acid molecule.

[0614] In another embodiment, the expression vector comprises: a) a transcription initiation region; b) a transcription termination region; c) an intron; d) an open reading frame; and e) a nucleic acid sequence encoding at least one strand of a siNA molecule, wherein the sequence is operably linked to the 3′-end of the open reading frame and wherein the sequence is operably linked to the initiation region, the intron, the open reading frame and the termination region in a manner which allows expression and/or delivery of the siNA molecule.

### SREBP1 Biology and Biochemistry

[0615] Cardiovascular disease is the number one killer in the United States, and atherosclerosis is the major cause of heart disease and stroke (“Heart and Stroke Statistical Update”, American Heart Association, Dallas, Tex., USA, 1997). It is known that cholesterol plays an important role in atherogenesis (Kannel et al., 1971, Ann. Intern. Med. 74:1-12). In mammals, most cholesterol serves as a structural element in the walls of cells, whereas the rest either serves as the starting material for the synthesis of bile acids, steroid hormones and vitamin D or is in transit in the blood to a given location.

[0616] The transport of cholesterol and other lipids through the circulatory system is mediated by their packaging into lipoprotein carriers. These spherical particles comprise protein and phospholipid shells surrounding a core of neutral lipid, including unesterified or esterified cholesterol and triglycerides.

[0617] It is known that the risk of atherosclerosis increases with increasing concentrations of low-density lipoprotein (LDL) cholesterol. In contrast, risk of cardiovascular disease is inversely related to concentrations of high-density lipoprotein (HDL) cholesterol (Gordon et al., 1977, Am. J. Med. 62:707-14).

[0618] Although cholesterol plays a crucial role in the etiology of atherosclerosis, numerous other genetic and environmental factors are known to contribute to the disease. For example, non-modifiable factors that influence disease pre-disposition include age (risk increases with age), gender (men are more prone than are pre-menopausal women) and family history (i.e., genetics). Modifiable factors that increase risk of disease include obesity, blood pressure, diet, exercise, poor control of diabetes, alcohol intake and smoking. Thus, the risk of atherosclerosis is determined by a complex interplay of genetic and environmental risk factors (Pearson, 2002, Circulation, 105:886-892). While there is considerable knowledge of the environmental risk factors, present understanding of the genetics of atherosclerosis is poor.

[0619] Because LDL and HDL have opposing and significant effects on the risk of atherosclerosis, understanding the genetic contribution to levels of these lipoproteins in the blood not only will enhance the understanding of atherosclerosis but can also facilitate identification of at-risk individuals, even before abnormalities in their plasma HDL and LDL levels become apparent. Indeed, mutations in the LDL receptor gene result in familial hypercholesterolemia, a disease characterized by elevated plasma LDL levels and premature atherosclerosis (Goldstein & Brown, in The Metabolic Basis of Inherited Disease, 6th ed., (Scriver, Beaudet, Sly and Valle, eds.), McGraw-Hill, New York, N.Y., USA, (1989) pp. 1215-1250). Similarly, mutations in the ATP-binding cassette 1 (ABC1) gene cause Tangier disease, a disorder that is characterized by the near-absence of HDL in plasma, peripheral neuropathy and premature heart disease (Bodzioch et al., 1999, Nature Genet. 22:347-351). Thus, genes that influence plasma HDL and LDL levels can serve as targets for drugs that modulate lipid levels and therefore the risk of atherosclerosis. In fact, drugs known as “statins” inhibit the enzyme, 3-hydroxy-3-methylglutaryl-CoA-reductase (HMG CoA reductase), and thereby reduce both levels of plasma LDL levels and risk of atherosclerosis (Sacks et al., 1996, N. Engl. J. Med. 335:1001-1009). Analogous drugs that significantly increase plasma HDL levels are not presently known.

[0620] A family of transcription factors called Sterol Response Element Binding Proteins (SREBPs) regulates lipid levels in mammals. It is known that genes called Sterol Response Element Binding Protein 1 (SREBP1) and called Sterol Response Element Binding Protein 2 (SREBP2) directly activate the expression of over thirty different genes implicated in the synthesis and uptake of cholesterol, fatty acids, triglycerides, phospholipids and the NADPH co-factor required to synthesize these molecules (Horton et al., 2001, J. Clin. Invest. 109:1125-1131). Further, it is known that the expression of both the LDL receptor and HDL receptor genes is regulated by SREBPs (Smith et al., 1990, J. Biol. Chem. 265: 2306-2310; Lopez & McLean, 1999, Endocrinol. 140:5669-5681). Thus, the inter-individual variation in plasma HDL and LDL levels (and therefore variation in risk of atherosclerosis) seen in the general population can be attributed, at least in part, to genetic variation in SREBPs.

[0621] Based upon the current understanding of SREBP1 function, the modulation of SREBP1 and other related genes is instrumental in the development of new therapeutics for metabolic disease. As such, modulation of SREBP1 using small interfering nucleic acid (siNA) mediated RNAi represents a novel approach to the treatment and study of diseases and conditions related to SREBP1 activity and/or gene expression including hyperlipidemia, hypercholesterolemia, cardiovascular disease, atherosclerosis, hypertension, diabetis (e.g., type I and/or type II diabetis), insulin resistance, obesity and/or other disease states, conditions, or traits associated with SREBP1 gene expression or activity in a subject or organism.

### EXAMPLES

[0622] The following are non-limiting examples showing the selection, isolation, synthesis and activity of nucleic acids of the instant invention.

### Example 1

### Tandem Synthesis of siNA Constructs

[0623] Exemplary siNA molecules of the invention are synthesized in tandem using a cleavable linker, for example, a succinyl-based linker. Tandem synthesis as described herein is followed by a one-step purification process that provides RNAi molecules in high yield. This approach is highly amenable to siNA synthesis in support of high throughput RNAi screening, and can be readily adapted to multi-column or multi-well synthesis platforms.

[0624] After completing a tandem synthesis of a siNA oligo and its complement in which the 5′-terminal dimethoxytrityl (5′-O-DMT) group remains intact (trityl on synthesis), the oligonucleotides are deprotected as described above. Following deprotection, the siNA sequence strands are allowed to spontaneously hybridize. This hybridization yields a duplex in which one strand has retained the 5′-O-DMT group while the complementary strand comprises a terminal 5′-hydroxyl. The newly formed duplex behaves as a single molecule during routine solid-phase extraction purification (Trityl-On purification) even though only one molecule has a dimethoxytrityl group. Because the strands form a stable duplex, this dimethoxytrityl group (or an equivalent group, such as other trityl groups or other hydrophobic moieties) is all that is required to purify the pair of oligos, for example, by using a C18 cartridge.

[0625] Standard phosphoramidite synthesis chemistry is used up to the point of introducing a tandem linker, such as an inverted deoxy abasic succinate or glyceryl succinate linker (see FIG. 1) or an equivalent cleavable linker. A non-limiting example of linker coupling conditions that can be used includes a hindered base such as diisopropylethylamine (DIPA) and/or DMAP in the presence of an activator reagent such as Bromotripyrrolidinophosphoniumhexafluororophosphate (PyBrOP). After the linker is coupled, standard synthesis chemistry is utilized to complete synthesis of the second sequence leaving the terminal the 5′-O-DMT intact. Following synthesis, the resulting oligonucleotide is deprotected according to the procedures described herein and quenched with a suitable buffer, for example with 50 mM NaOAc or 1.5M NH₄H₂CO₃.

[0626] Purification of the siNA duplex can be readily accomplished using solid phase extraction, for example, using a Waters C18 SepPak 1 g cartridge conditioned with 1 column volume (CV) of acetonitrile, 2 CV H2O, and 2 CV 50 mM NaOAc. The sample is loaded and then washed with 1 CV H2O or 50 mM NaOAc. Failure sequences are eluted with 1 CV 14% ACN (Aqueous with 50 mM NaOAc and 50 mM NaCl). The column is then washed, for example with 1 CV H2O followed by on-column detritylation, for example by passing 1 CV of 1% aqueous trifluoroacetic acid (TFA) over the column, then adding a second CV of 1% aqueous TFA to the column and allowing to stand for approximately 10 minutes. The remaining TFA solution is removed and the column washed with H20 followed by 1 CV 1M NaCl and additional H2O. The siNA duplex product is then eluted, for example, using 1 CV 20% aqueous CAN.

[0627] FIG. 2 provides an example of MALDI-TOF mass spectrometry analysis of a purified siNA construct in which each peak corresponds to the calculated mass of an individual siNA strand of the siNA duplex. The same purified siNA provides three peaks when analyzed by capillary gel electrophoresis (CGE), one peak presumably corresponding to the duplex siNA, and two peaks presumably corresponding to the separate siNA sequence strands. Ion exchange HPLC analysis of the same siNA contract only shows a single peak. Testing of the purified siNA construct using a luciferase reporter assay described below demonstrated the same RNAi activity compared to siNA constructs generated from separately synthesized oligonucleotide sequence strands.

### Example 2

### Identification of Potential siNA Target Sites in any RNA Sequence

[0628] The sequence of an RNA target of interest, such as a human SREBP1 mRNA transcript, is screened for target sites, for example by using a computer folding algorithm. In a non-limiting example, the sequence of a gene or RNA gene transcript derived from a database, such as Genbank, is used to generate siNA targets having complementarity to the target. Such sequences can be obtained from a database, or can be determined experimentally as known in the art. Target sites that are known, for example, those target sites determined to be effective target sites based on studies with other nucleic acid molecules, for example ribozymes or antisense, or those targets known to be associated with a disease, trait, or condition such as those sites containing mutations or deletions, can be used to design siNA molecules targeting those sites. Various parameters can be used to determine which sites are the most suitable target sites within the target RNA sequence. These parameters include but are not limited to secondary or tertiary RNA structure, the nucleotide base composition of the target sequence, the degree of homology between various regions of the target sequence, or the relative position of the target sequence within the RNA transcript. Based on these determinations, any number of target sites within the RNA transcript can be chosen to screen siNA molecules for efficacy, for example by using in vitro RNA cleavage assays, cell culture, or animal models. In a non-limiting example, anywhere from 1 to 1000 target sites are chosen within the transcript based on the size of the siNA construct to be used. High throughput screening assays can be developed for screening siNA molecules using methods known in the art, such as with multi-well or multi-plate assays to determine efficient reduction in target gene expression.

### Example 3

### Selection of siNA Molecule Target Sites in a RNA

[0629] The following non-limiting steps can be used to carry out the selection of siNAs targeting a given gene sequence or transcript.

[0630] 1. The target sequence is parsed in silico into a list of all fragments or subsequences of a particular length, for example 23 nucleotide fragments, contained within the target sequence. This step is typically carried out using a custom Perl script, but commercial sequence analysis programs such as Oligo, MacVector, or the GCG Wisconsin Package can be employed as well.

[0631] 2. In some instances the siNAs correspond to more than one target sequence; such would be the case for example in targeting different transcripts of the same gene, targeting different transcripts of more than one gene, or for targeting both the human gene and an animal homolog. In this case, a subsequence list of a particular length is generated for each of the targets, and then the lists are compared to find matching sequences in each list. The subsequences are then ranked according to the number of target sequences that contain the given subsequence; the goal is to find subsequences that are present in most or all of the target sequences. Alternately, the ranking can identify subsequences that are unique to a target sequence, such as a mutant target sequence. Such an approach would enable the use of siNA to target specifically the mutant sequence and not effect the expression of the normal sequence.

[0632] 3. In some instances the siNA subsequences are absent in one or more sequences while present in the desired target sequence; such would be the case if the siNA targets a gene with a paralogous family member that is to remain untargeted. As in case 2 above, a subsequence list of a particular length is generated for each of the targets, and then the lists are compared to find sequences that are present in the target gene but are absent in the untargeted paralog.

[0633] 4. The ranked siNA subsequences can be further analyzed and ranked according to GC content. A preference can be given to sites containing 30-70% GC, with a further preference to sites containing 40-60% GC.

[0634] 5. The ranked siNA subsequences can be further analyzed and ranked according to self-folding and internal hairpins. Weaker internal folds are preferred; strong hairpin structures are to be avoided.

[0635] 6. The ranked siNA subsequences can be further analyzed and ranked according to whether they have runs of GGG or CCC in the sequence. GGG (or even more Gs) in either strand can make oligonucleotide synthesis problematic and can potentially interfere with RNAi activity, so it is avoided whenever better sequences are available. CCC is searched in the target strand because that will place GGG in the antisense strand.

[0636] 7. The ranked siNA subsequences can be further analyzed and ranked according to whether they have the dinucleotide UU (uridine dinucleotide) on the 3′-end of the sequence, and/or AA on the 5′-end of the sequence (to yield 3′ UU on the antisense sequence). These sequences allow one to design siNA molecules with terminal TT thymidine dinucleotides.

[0637] 8. Four or five target sites are chosen from the ranked list of subsequences as described above. For example, in subsequences having 23 nucleotides, the right 21 nucleotides of each chosen 23-mer subsequence are then designed and synthesized for the upper (sense) strand of the siNA duplex, while the reverse complement of the left 21 nucleotides of each chosen 23-mer subsequence are then designed and synthesized for the lower (antisense) strand of the siNA duplex (see Table II). If terminal TT residues are desired for the sequence (as described in paragraph 7), then the two 3′ terminal nucleotides of both the sense and antisense strands are replaced by TT prior to synthesizing the oligos.

[0638] 9. The siNA molecules are screened in an in vitro, cell culture or animal model system to identify the most active siNA molecule or the most preferred target site within the target RNA sequence.

[0639] 10. Other design considerations can be used when selecting target nucleic acid sequences, see, for example, Reynolds et al., 2004, Nature Biotechnology Advanced Online Publication, 1 Feb. 2004, doi:10.1038/nbt936 and Ui-Tei et al., 2004, Nucleic Acids Research, 32, doi:10.1093/nar/gkh247.

[0640] In an alternate approach, a pool of siNA constructs specific to a target sequence is used to screen for target sites in cells expressing target RNA, such as cultured Jurkat, HeLa, A549 or 293T cells. The general strategy used in this approach is shown in FIG. 9. Cells expressing the target RNA are transfected with the pool of siNA constructs and cells that demonstrate a phenotype associated with target inhibition are sorted. The pool of siNA constructs can be expressed from transcription cassettes inserted into appropriate vectors (see for example FIG. 7 and FIG. 8). The siNA from cells demonstrating a positive phenotypic change (e.g., decreased proliferation, decreased target mRNA levels or decreased target protein expression), are sequenced to determine the most suitable target site(s) within the target RNA sequence.

[0641] In one embodiment, siNA molecules of the invention are selected using the following methodology. The following guidelines were compiled to predict hyper-active siNAs that contain chemical modifications described herein. These rules emerged from a comparative analysis of hyper-active (>75% knockdown of target mRNA levels) and inactive (<75% knockdown of target mRNA levels) siNAs against several different targets. A total of 242 siNA sequences were analyzed. Thirty-five siNAs out of 242 siRNAs were grouped into hyper-active and the remaining siNAs were grouped into inactive groups. The hyper-active siNAs clearly showed a preference for certain bases at particular nucleotide positions within the siNA sequence. For example, A or U nucleobase was overwhelmingly present at position 19 of the sense strand in hyper-active siNAs and opposite was true for inactive siNAs. There was also a pattern of a A/U rich (3 out of 5 bases as A or U) region between positions 15-19 and G/C rich region between positions 1-5 (3 out of 5 bases as G or C) of the sense strand in hyperactive siNAs. As shown in Table VII, 12 such patterns were identified that were characteristics of hyper-active siNAs. It is to be noted that not every pattern was present in each hyper-active siNA. Thus, to design an algorithm for predicting hyper-active siNAs, a different score was assigned for each pattern. Depending on how frequently such patterns occur in hyper-active siRNAs versus inactive siRNAs, the design parameters were assigned a score with the highest being 10. If a certain nucleobase is not preferred at a position, then a negative score was assigned. For example, at positions 9 and 13 of the sense strand, a G nucleotide was not preferred in hyper-active siNAs and therefore they were given score of −3 (minus 3). The differential score for each pattern is given in Table VII. The pattern # 4 was given a maximum score of −100. This is mainly to weed out any sequence that contains string of 4Gs or 4Cs as they can be highly incompatible for synthesis and can allow sequences to self-aggregate, thus rendering the siNA inactive. Using this algorithm, the highest score possible for any siNA is 66. As there are numerous siNA sequences possible against any given target of reasonable size (˜1000 nucleotides), this algorithm is useful to generate hyper-active siNAs.

[0642] In one embodiment, rules 1-11 shown in Table VII are used to generate active siNA molecules of the invention. In another embodiment, rules 1-12 shown in Table VII are used to generate active siNA molecules of the invention.

### Example 4

### SREBP1 siNA Design

[0643] siNA target sites were chosen by analyzing sequences of the SREBP1 target and optionally prioritizing the target sites on the basis of the rules presented in Example 3 above, and alternately on the basis of folding (structure of any given sequence analyzed to determine siNA accessibility to the target), or by using a library of siNA molecules as described in Example 3, or alternately by using an in vitro siNA system as described in Example 6 herein. siNA molecules were designed that could bind each target and are selected using the algorithm above and are optionally individually analyzed by computer folding to assess whether the siNA molecule can interact with the target sequence. Varying the length of the siNA molecules can be chosen to optimize activity. Generally, a sufficient number of complementary nucleotide bases are chosen to bind to, or otherwise interact with, the target RNA, but the degree of complementarity can be modulated to accommodate siNA duplexes or varying length or base composition. By using such methodologies, siNA molecules can be designed to target sites within any known RNA sequence, for example those RNA sequences corresponding to the any gene transcript.

[0644] SREBP1 sequences (Table I) were analysed to generate SREBP1 targets from which double stranded siNA were designed (Table II). To generate synthetic siNA constructs (Table III), the algorithm described in Example 3 was utilized to pick active double stranded constructs and chemically modified versions thereof. In each of Tables II and III, the target sequence is shown, along with the upper (sense strand) and lower (antisense strand) of the siNA duplex. Multifunctional siNAs are designed by searching for homologous sites between different target sequences (e.g., 11 nucleotide regions of shared homology) and allowing for up to 3 wobble bp (G:U) or up to 2 mismatches.

[0645] Chemically modified siNA constructs were designed as described herein (see for example Table V) to provide nuclease stability for systemic administration in vivo and/or improved pharmacokinetic, localization, and delivery properties while preserving the ability to mediate RNAi activity. Chemical modifications as described herein are introduced synthetically using synthetic methods described herein and those generally known in the art. The synthetic siNA constructs are then assayed for nuclease stability in serum and/or cellular/tissue extracts (e.g. liver extracts). The synthetic siNA constructs are also tested in parallel for RNAi activity using an appropriate assay, such as a luciferase reporter assay as described herein or another suitable assay that can quantity RNAi activity. Synthetic siNA constructs that possess both nuclease stability and RNAi activity can be further modified and re-evaluated in stability and activity assays. The chemical modifications of the stabilized active siNA constructs can then be applied to any siNA sequence targeting any chosen RNA and used, for example, in target screening assays to pick lead siNA compounds for therapeutic development (see for example FIG. 11).

### Example 5

### Chemical Synthesis and Purification of siNA

[0646] siNA molecules can be designed to interact with various sites in the RNA message, for example, target sequences within the RNA sequences described herein. The sequence of one strand of the siNA molecule(s) is complementary to the target site sequences described above. The siNA molecules can be chemically synthesized using methods described herein. Inactive siNA molecules that are used as control sequences can be synthesized by scrambling the sequence of the siNA molecules such that it is not complementary to the target sequence. Generally, siNA constructs can by synthesized using solid phase oligonucleotide synthesis methods as described herein (see for example Usman et al., U.S. Pat. Nos. 5,804,683; 5,831,071; 5,998,203; 6,117,657; 6,353,098; 6,362,323; 6,437,117; 6,469,158; Scaringe et al., U.S. Pat. Nos. 6,111,086; 6,008,400; 6,111,086 all incorporated by reference herein in their entirety).

[0647] In a non-limiting example, RNA oligonucleotides are synthesized in a stepwise fashion using the phosphoramidite chemistry as is known in the art. Standard phosphoramidite chemistry involves the use of nucleosides comprising any of 5′-O-dimethoxytrityl, 2′-O-tert-butyldimethylsilyl, 3′-O-2-Cyanoethyl N,N-diisopropylphosphoroamidite groups, and exocyclic amine protecting groups (e.g. N6-benzoyl adenosine, N4 acetyl cytidine, and N2-isobutyryl guanosine). Alternately, 2′-O-Silyl Ethers can be used in conjunction with acid-labile 2′-O-orthoester protecting groups in the synthesis of RNA as described by Scaringe supra. Differing 2′ chemistries can require different protecting groups, for example 2′-deoxy-2′-amino nucleosides can utilize N-phthaloyl protection as described by Usman et al., U.S. Pat. No. 5,631,360, incorporated by reference herein in its entirety).

[0648] During solid phase synthesis, each nucleotide is added sequentially (3′- to 5′-direction) to the solid support-bound oligonucleotide. The first nucleoside at the 3′-end of the chain is covalently attached to a solid support (e.g., controlled pore glass or polystyrene) using various linkers. The nucleotide precursor, a ribonucleoside phosphoramidite, and activator are combined resulting in the coupling of the second nucleoside phosphoramidite onto the 5′-end of the first nucleoside. The support is then washed and any unreacted 5′-hydroxyl groups are capped with a capping reagent such as acetic anhydride to yield inactive 5′-acetyl moieties. The trivalent phosphorus linkage is then oxidized to a more stable phosphate linkage. At the end of the nucleotide addition cycle, the 5′-O-protecting group is cleaved under suitable conditions (e.g., acidic conditions for trityl-based groups and fluoride for silyl-based groups). The cycle is repeated for each subsequent nucleotide.

[0649] Modification of synthesis conditions can be used to optimize coupling efficiency, for example by using differing coupling times, differing reagent/phosphoramidite concentrations, differing contact times, differing solid supports and solid support linker chemistries depending on the particular chemical composition of the siNA to be synthesized. Deprotection and purification of the siNA can be performed as is generally described in Usman et al., U.S. Pat. No. 5,831,071, U.S. Pat. No. 6,353,098, U.S. Pat. No. 6,437,117, and Bellon et al., U.S. Pat. No. 6,054,576, U.S. Pat. No. 6,162,909, U.S. Pat. No. 6,303,773, or Scaringe supra, incorporated by reference herein in their entireties. Additionally, deprotection conditions can be modified to provide the best possible yield and purity of siNA constructs. For example, applicant has observed that oligonucleotides comprising 2′-deoxy-2′-fluoro nucleotides can degrade under inappropriate deprotection conditions. Such oligonucleotides are deprotected using aqueous methylamine at about 35° C. for 30 minutes. If the 2′-deoxy-2′-fluoro containing oligonucleotide also comprises ribonucleotides, after deprotection with aqueous methylamine at about 35° C. for 30 minutes, TEA-HF is added and the reaction maintained at about 65° C. for an additional 15 minutes.

### Example 6

### RNAi In Vitro Assay to Assess siNA Activity

[0650] An in vitro assay that recapitulates RNAi in a cell-free system is used to evaluate siNA constructs targeting target RNA targets. The assay comprises the system described by Tuschl et al., 1999, Genes and Development, 13, 3191-3197 and Zamore et al., 2000, Cell, 101, 25-33 adapted for use with a target RNA. A Drosophila extract derived from syncytial blastoderm is used to reconstitute RNAi activity in vitro. Target RNA is generated via in vitro transcription from an appropriate target expressing plasmid using T7 RNA polymerase or via chemical synthesis as described herein. Sense and antisense siNA strands (for example 20 uM each) are annealed by incubation in buffer (such as 100 mM potassium acetate, 30 mM HEPES-KOH, pH 7.4, 2 mM magnesium acetate) for 1 minute at 90° C. followed by 1 hour at 37° C., then diluted in lysis buffer (for example 100 mM potassium acetate, 30 mM HEPES-KOH at pH 7.4, 2 mM magnesium acetate). Annealing can be monitored by gel electrophoresis on an agarose gel in TBE buffer and stained with ethidium bromide. The Drosophila lysate is prepared using zero to two-hour-old embryos from Oregon R flies collected on yeasted molasses agar that are dechorionated and lysed. The lysate is centrifuged and the supernatant isolated. The assay comprises a reaction mixture containing 50% lysate [vol/vol], RNA (10-50 pM final concentration), and 10% [vol/vol] lysis buffer containing siNA (10 nM final concentration). The reaction mixture also contains 10 mM creatine phosphate, 10 ug/ml creatine phosphokinase, 100 um GTP, 100 uM UTP, 100 uM CTP, 500 uM ATP, 5 mM DTT, 0.1 U/uL RNasin (Promega), and 100 uM of each amino acid. The final concentration of potassium acetate is adjusted to 100 mM. The reactions are pre-assembled on ice and preincubated at 25° C. for 10 minutes before adding RNA, then incubated at 25° C. for an additional 60 minutes. Reactions are quenched with 4 volumes of 1.25× Passive Lysis Buffer (Promega). Target RNA cleavage is assayed by RT-PCR analysis or other methods known in the art and are compared to control reactions in which siNA is omitted from the reaction.

[0651] Alternately, internally-labeled target RNA for the assay is prepared by in vitro transcription in the presence of [alpha-³²P] CTP, passed over a G50 Sephadex column by spin chromatography and used as target RNA without further purification. Optionally, target RNA is 5′-³²P-end labeled using T4 polynucleotide kinase enzyme. Assays are performed as described above and target RNA and the specific RNA cleavage products generated by RNAi are visualized on an autoradiograph of a gel. The percentage of cleavage is determined by PHOSPHOR IMAGER® (autoradiography) quantitation of bands representing intact control RNA or RNA from control reactions without siNA and the cleavage products generated by the assay.

[0652] In one embodiment, this assay is used to determine target sites in the target RNA target for siNA mediated RNAi cleavage, wherein a plurality of siNA constructs are screened for RNAi mediated cleavage of the target RNA target, for example, by analyzing the assay reaction by electrophoresis of labeled target RNA, or by northern blotting, as well as by other methodology well known in the art.

### Example 7

### Nucleic Acid Inhibition of SREBP1 Target RNA

[0653] siNA molecules targeted to SREBP1 RNA are designed and synthesized as described above. These nucleic acid molecules can be tested for cleavage activity in vivo, for example, using the following procedure. The target sequences and the nucleotide location within the SREBP1 RNA are given in Table II and III.

[0654] Two formats are used to test the efficacy of siNAs targeting SREBP1. First, the reagents are tested in cell culture using HepG2, Jurkat, HeLa, A549 or 293T cells, to determine the extent of RNA and protein inhibition. siNA reagents (e.g.; see Tables II and III) are selected against the SREBP1 target as described herein. RNA inhibition is measured after delivery of these reagents by a suitable transfection agent to, for example, HepG2, Jurkat, HeLa, A549 or 293T cells. Relative amounts of target RNA are measured versus actin using real-time PCR monitoring of amplification (eg., ABI 7700 TAQMAN®). A comparison is made to a mixture of oligonucleotide sequences made to unrelated targets or to a randomized siNA control with the same overall length and chemistry, but randomly substituted at each position. Primary and secondary lead reagents are chosen for the target and optimization performed. After an optimal transfection agent concentration is chosen, a RNA time-course of inhibition is performed with the lead siNA molecule. In addition, a cell-plating format can be used to determine RNA inhibition.

Delivery of siNA to Cells

[0655] Cells (e.g., HepG2, Jurkat, HeLa, A549 or 293T cells) are seeded, for example, at 1×10⁵ cells per well of a six-well dish in EGM-2 (BioWhittaker) the day before transfection. siNA (final concentration, for example 20 nM) and cationic lipid (e.g., LNP formulations herein, or another suitable lipid such as Lipofectamine, final concentration 2 μg/ml) are complexed in EGM basal media (Biowhittaker) at 37° C. for 30 minutes in polystyrene tubes. Following vortexing, the complexed siNA is added to each well and incubated for the times indicated. For initial optimization experiments, cells are seeded, for example, at 1×10³ in 96 well plates and siNA complex added as described. Efficiency of delivery of siNA to cells is determined using a fluorescent siNA complexed with lipid. Cells in 6-well dishes are incubated with siNA for 24 hours, rinsed with PBS and fixed in 2% paraformaldehyde for 15 minutes at room temperature. Uptake of siNA is visualized using a fluorescent microscope.

TAQMAN® (Real-Time PCR Monitoring of Amplification) and Lightcycler Quantification of mRNA

[0656] Total RNA is prepared from cells following siNA delivery, for example, using Qiagen RNA purification kits for 6-well or Rneasy extraction kits for 96-well assays. For TAQMAN® analysis (real-time PCR monitoring of amplification), dual-labeled probes are synthesized with the reporter dye, FAM or JOE, covalently linked at the 5′-end and the quencher dye TAMRA conjugated to the 3′-end. One-step RT-PCR amplifications are performed on, for example, an ABI PRISM 7700 Sequence Detector using 50 μl reactions consisting of 10 μl total RNA, 100 nM forward primer, 900 mM reverse primer, 100 nM probe, 1× TaqMan PCR reaction buffer (PE-Applied Biosystems), 5.5 mM MgCl₂, 300 μM each dATP, dCTP, dGTP, and dTTP, 10 U RNase Inhibitor (Promega), 1.25 U AMPLITAQ GOLDS (DNA polymerase) (PE-Applied Biosystems) and 10 U M-MLV Reverse Transcriptase (Promega). The thermal cycling conditions can consist of 30 minutes at 48° C., 10 minutes at 95° C., followed by 40 cycles of 15 seconds at 95° C. and 1 minute at 60° C. Quantitation of mRNA levels is determined relative to standards generated from serially diluted total cellular RNA (300, 100, 33, 11 ng/reaction) and normalizing to β-actin or GAPDH mRNA in parallel TAQMAN® reactions (real-time PCR monitoring of amplification). For each gene of interest an upper and lower primer and a fluorescently labeled probe are designed. Real time incorporation of SYBR Green I dye into a specific PCR product can be measured in glass capillary tubes using a lightcyler. A standard curve is generated for each primer pair using control cRNA. Values are represented as relative expression to GAPDH in each sample.

### Western Blotting

[0657] Nuclear extracts can be prepared using a standard micro preparation technique (see for example Andrews and Faller, 1991, Nucleic Acids Research, 19, 2499). Protein extracts from supernatants are prepared, for example using TCA precipitation. An equal volume of 20% TCA is added to the cell supernatant, incubated on ice for 1 hour and pelleted by centrifugation for 5 minutes. Pellets are washed in acetone, dried and resuspended in water. Cellular protein extracts are run on a 10% Bis-Tris NuPage (nuclear extracts) or 4-12% Tris-Glycine (supernatant extracts) polyacrylamide gel and transferred onto nitro-cellulose membranes. Non-specific binding can be blocked by incubation, for example, with 5% non-fat milk for 1 hour followed by primary antibody for 16 hour at 4° C. Following washes, the secondary antibody is applied, for example (1:10,000 dilution) for 1 hour at room temperature and the signal detected with SuperSignal reagent (Pierce).

### Example 8

### Models Useful to Evaluate the Down-Regulation of SREBP1 Gene Expression

[0658] Evaluating the efficacy of siNA molecules of the invention in animal models is an important prerequisite to human clinical trials. Various animal models of metabolic and cardiovascular diseases, conditions, or disorders as are known in the art can be adapted for use for pre-clinical evaluation of the efficacy of nucleic acid compositions of the invention in modulating target (e.g., SREBP1) gene expression toward therapeutic or research use. Goldberg, 2004, J Clin Invest. 114(5): 613-615, provides a review of animal models useful for evaluating therapeutic agents for metabolic disease, including hyperlipidemia and diabetes. These models and others can be utilized to evaluate the efficacy of siNA molecules and compositions of the invention in treating metabolic and related diseases and conditions.

### Example 9

### RNAi Mediated Inhibition of SREBP1 Gene Expression

[0659] In Vitro siNA Mediated Inhibition of SREBP1 RNA

[0660] siNA constructs are tested for efficacy in reducing SREBP1 RNA expression in cells, (e.g., HepG2 cells). Cells are plated approximately 24 hours before transfection in 96-well plates at 5,000-7,500 cells/well, 100 μl/well, such that at the time of transfection cells are 70-90% confluent. For transfection, annealed siNAs are mixed with the transfection reagent (Lipofectamine 2000, Invitrogen) in a volume of 50 μl/well and incubated for 20 minutes at room temperature. The siNA transfection mixtures are added to cells to give a final siNA concentration of 25 nM in a volume of 150 μl. Each siNA transfection mixture is added to 3 wells for triplicate siNA treatments. Cells are incubated at 37° for 24 hours in the continued presence of the siNA transfection mixture. At 24 hours, RNA is prepared from each well of treated cells. The supernatants with the transfection mixtures are first removed and discarded, then the cells are lysed and RNA prepared from each well. Target gene expression following treatment is evaluated by RT-PCR for the SREBP1 gene and for a control gene (36B4, an RNA polymerase subunit) for normalization. The triplicate data is averaged and the standard deviations determined for each treatment. Normalized data are graphed and the percent reduction of target mRNA by active siNAs in comparison to their respective inverted control siNAs is determined.

### Example 10

### Indications

[0661] Particular conditions and disease states that can be associated with gene expression modulation include, but are not limited to metabolic and cardiovascular diseases, conditions, or disorders as described herein or otherwise known in the art, and any other diseases, conditions or disorders that are related to or will respond to the levels of a target (e.g., target SREBP1 protein or target SREBP1 polynucleotide) in a cell or tissue, alone or in combination with other therapies. Non-limiting examples of such diseases and conditions include hyperlipidemia, hypercholesterolemia, dyslipidemia, cardiovascular disease, atherosclerosis, hypertension, diabetis (e.g., type I and/or type II diabetis), insulin resistance, obesity, and/or metabolic syndrome.

### Example 11

### Multifunctional siNA Inhibition of Target RNA Expression

[0662] Multifunctional siNA Design

[0663] Once target sites have been identified for multifunctional siNA constructs, each strand of the siNA is designed with a complementary region of length, for example, of about 18 to about 28 nucleotides, that is complementary to a different target nucleic acid sequence. Each complementary region is designed with an adjacent flanking region of about 4 to about 22 nucleotides that is not complementary to the target sequence, but which comprises complementarity to the complementary region of the other sequence (see for example FIG. 16). Hairpin constructs can likewise be designed (see for example FIG. 17). Identification of complementary, palindrome or repeat sequences that are shared between the different target nucleic acid sequences can be used to shorten the overall length of the multifunctional siNA constructs (see for example FIGS. 18 and 19).

[0664] In a non-limiting example, three additional categories of additional multifunctional siNA designs are presented that allow a single siNA molecule to silence multiple targets. The first method utilizes linkers to join siNAs (or multifunctional siNAs) in a direct manner. This can allow the most potent siNAs to be joined without creating a long, continuous stretch of RNA that has potential to trigger an interferon response. The second method is a dendrimeric extension of the overlapping or the linked multifunctional design; or alternatively the organization of siNA in a supramolecular format. The third method uses helix lengths greater than 30 base pairs. Processing of these siNAs by Dicer will reveal new, active 5′ antisense ends. Therefore, the long siNAs can target the sites defined by the original 5′ ends and those defined by the new ends that are created by Dicer processing. When used in combination with traditional multifunctional siNAs (where the sense and antisense strands each define a target) the approach can be used for example to target 4 or more sites.

I. Tethered Bifunctional siNAs

[0665] The basic idea is a novel approach to the design of multifunctional siNAs in which two antisense siNA strands are annealed to a single sense strand. The sense strand oligonucleotide contains a linker (e.g., non-nucleotide linker as described herein) and two segments that anneal to the antisense siNA strands (see FIG. 22). The linkers can also optionally comprise nucleotide-based linkers. Several potential advantages and variations to this approach include, but are not limited to:
[0666] 1. The two antisense siNAs are independent. Therefore, the choice of target sites is not constrained by a requirement for sequence conservation between two sites. Any two highly active siNAs can be combined to form a multifunctional siNA.
[0667] 2. When used in combination with target sites having homology, siNAs that target a sequence present in two genes (e.g., different isoforms), the design can be used to target more than two sites. A single multifunctional siNA can be for example, used to target RNA of two different target RNAs.
[0668] 3. Multifunctional siNAs that use both the sense and antisense strands to target a gene can also be incorporated into a tethered multifuctional design. This leaves open the possibility of targeting 6 or more sites with a single complex.
[0669] 4. It can be possible to anneal more than two antisense strand siNAs to a single tethered sense strand.
[0670] 5. The design avoids long continuous stretches of dsRNA. Therefore, it is less likely to initiate an interferon response.
[0671] 6. The linker (or modifications attached to it, such as conjugates described herein) can improve the pharmacokinetic properties of the complex or improve its incorporation into liposomes. Modifications introduced to the linker should not impact siNA activity to the same extent that they would if directly attached to the siNA (see for example FIGS. 27 and 28).
[0672] 7. The sense strand can extend beyond the annealed antisense strands to provide additional sites for the attachment of conjugates.
[0673] 8. The polarity of the complex can be switched such that both of the antisense 3′ ends are adjacent to the linker and the 5′ ends are distal to the linker or combination thereof.
   Dendrimer and Supramolecular siNAs

[0674] In the dendrimer siNA approach, the synthesis of siNA is initiated by first synthesizing the dendrimer template followed by attaching various functional siNAs. Various constructs are depicted in FIG. 23. The number of functional siNAs that can be attached is only limited by the dimensions of the dendrimer used.

Supramolecular Approach to Multifunctional siNA

[0675] The supramolecular format simplifies the challenges of dendrimer synthesis. In this format, the siNA strands are synthesized by standard RNA chemistry, followed by annealing of various complementary strands. The individual strand synthesis contains an antisense sense sequence of one siNA at the 5′-end followed by a nucleic acid or synthetic linker, such as hexaethyleneglycol, which in turn is followed by sense strand of another siNA in 5′ to 3′ direction. Thus, the synthesis of siNA strands can be carried out in a standard 3′ to 5′ direction. Representative examples of trifunctional and tetrafunctional siNAs are depicted in FIG. 24. Based on a similar principle, higher functionality siNA constructs can be designed as long as efficient annealing of various strands is achieved.

Dicer Enabled Multifunctional siNA

[0676] Using bioinformatic analysis of multiple targets, stretches of identical sequences shared between differing target sequences can be identified ranging from about two to about fourteen nucleotides in length. These identical regions can be designed into extended siNA helixes (e.g., >30 base pairs) such that the processing by Dicer reveals a secondary functional 5′-antisense site (see for example FIG. 25). For example, when the first 17 nucleotides of a siNA antisense strand (e.g., 21 nucleotide strands in a duplex with 3′-TT overhangs) are complementary to a target RNA, robust silencing was observed at 25 nM. 80% silencing was observed with only 16 nucleotide complementarity in the same format.

[0677] Incorporation of this property into the designs of siNAs of about 30 to 40 or more base pairs results in additional multifunctional siNA constructs. The example in FIG. 25 illustrates how a 30 base-pair duplex can target three distinct sequences after processing by Dicer-RNaseIII; these sequences can be on the same mRNA or separate RNAs, such as viral and host factor messages, or multiple points along a given pathway (e.g., inflammatory cascades). Furthermore, a 40 base-pair duplex can combine a bifunctional design in tandem, to provide a single duplex targeting four target sequences. An even more extensive approach can include use of homologous sequences to enable five or six targets silenced for one multifunctional duplex. The example in FIG. 25 demonstrates how this can be achieved. A 30 base pair duplex is cleaved by Dicer into 22 and 8 base pair products from either end (8 b.p. fragments not shown). For ease of presentation the overhangs generated by dicer are not shown—but can be compensated for. Three targeting sequences are shown. The required sequence identity overlapped is indicated by grey boxes. The N's of the parent 30 b.p. siNA are suggested sites of 2′-OH positions to enable Dicer cleavage if this is tested in stabilized chemistries. Note that processing of a 30mer duplex by Dicer RNase III does not give a precise 22+8 cleavage, but rather produces a series of closely related products (with 22+8 being the primary site). Therefore, processing by Dicer will yield a series of active siNAs. Another non-limiting example is shown in FIG. 26. A 40 base pair duplex is cleaved by Dicer into 20 base pair products from either end. For ease of presentation the overhangs generated by dicer are not shown, but can be compensated for. Four targeting sequences are shown. The required sequence identity overlapped is indicated by shaded boxes. This design format can be extended to larger RNAs. If chemically stabilized siNAs are bound by Dicer, then strategically located ribonucleotide linkages can enable designer cleavage products that permit our more extensive repertoire of multifunctional designs. For example, cleavage products not limited to the Dicer standard of approximately 22-nucleotides can allow multifunctional siNA constructs with a target sequence identity overlap ranging from, for example, about 3 to about 15 nucleotides.

### Example 12

### Diagnostic Uses

[0678] The siNA molecules of the invention can be used in a variety of diagnostic applications, such as in the identification of molecular targets (e.g., RNA) in a variety of applications, for example, in clinical, industrial, environmental, agricultural and/or research settings. Such diagnostic use of siNA molecules involves utilizing reconstituted RNAi systems, for example, using cellular lysates or partially purified cellular lysates. siNA molecules of this invention can be used as diagnostic tools to examine genetic drift and mutations within diseased cells or to detect the presence of endogenous or exogenous, for example viral, RNA in a cell. The close relationship between siNA activity and the structure of the target RNA allows the detection of mutations in any region of the molecule, which alters the base-pairing and three-dimensional structure of the target RNA. By using multiple siNA molecules described in this invention, one can map nucleotide changes, which are important to RNA structure and function in vitro, as well as in cells and tissues. Cleavage of target RNAs with siNA molecules can be used to inhibit gene expression and define the role of specified gene products in the progression of disease or infection. In this manner, other genetic targets can be defined as important mediators of the disease. These experiments will lead to better treatment of the disease progression by affording the possibility of combination therapies (e.g., multiple siNA molecules targeted to different genes, siNA molecules coupled with known small molecule inhibitors, or intermittent treatment with combinations siNA molecules and/or other chemical or biological molecules). Other in vitro uses of siNA molecules of this invention are well known in the art, and include detection of the presence of mRNAs associated with a disease, infection, or related condition. Such RNA is detected by determining the presence of a cleavage product after treatment with a siNA using standard methodologies, for example, fluorescence resonance emission transfer (FRET).

[0679] In a specific example, siNA molecules that cleave only wild-type or mutant forms of the target RNA are used for the assay. The first siNA molecules (i.e., those that cleave only wild-type forms of target RNA) are used to identify wild-type RNA present in the sample and the second siNA molecules (i.e., those that cleave only mutant forms of target RNA) are used to identify mutant RNA in the sample. As reaction controls, synthetic substrates of both wild-type and mutant RNA are cleaved by both siNA molecules to demonstrate the relative siNA efficiencies in the reactions and the absence of cleavage of the “non-targeted” RNA species. The cleavage products from the synthetic substrates also serve to generate size markers for the analysis of wild-type and mutant RNAs in the sample population. Thus, each analysis requires two siNA molecules, two substrates and one unknown sample, which is combined into six reactions. The presence of cleavage products is determined using an RNase protection assay so that full-length and cleavage fragments of each RNA can be analyzed in one lane of a polyacrylamide gel. It is not absolutely required to quantify the results to gain insight into the expression of mutant RNAs and putative risk of the desired phenotypic changes in target cells. The expression of mRNA whose protein product is implicated in the development of the phenotype (i.e., disease related or infection related) is adequate to establish risk. If probes of comparable specific activity are used for both transcripts, then a qualitative comparison of RNA levels is adequate and decreases the cost of the initial diagnosis. Higher mutant form to wild-type ratios are correlated with higher risk whether RNA levels are compared qualitatively or quantitatively.

[0680] All patents and publications mentioned in the specification are indicative of the levels of skill of those skilled in the art to which the invention pertains. All references cited in this disclosure are incorporated by reference to the same extent as if each reference had been incorporated by reference in its entirety individually.

[0681] One skilled in the art would readily appreciate that the present invention is well adapted to carry out the objects and obtain the ends and advantages mentioned, as well as those inherent therein. The methods and compositions described herein as presently representative of preferred embodiments are exemplary and are not intended as limitations on the scope of the invention. Changes therein and other uses will occur to those skilled in the art, which are encompassed within the spirit of the invention, are defined by the scope of the claims.

[0682] It will be readily apparent to one skilled in the art that varying substitutions and modifications can be made to the invention disclosed herein without departing from the scope and spirit of the invention. Thus, such additional embodiments are within the scope of the present invention and the following claims. The present invention teaches one skilled in the art to test various combinations and/or substitutions of chemical modifications described herein toward generating nucleic acid constructs with improved activity for mediating RNAi activity. Such improved activity can comprise improved stability, improved bioavailability, and/or improved activation of cellular responses mediating RNAi. Therefore, the specific embodiments described herein are not limiting and one skilled in the art can readily appreciate that specific combinations of the modifications described herein can be tested without undue experimentation toward identifying siNA molecules with improved RNAi activity.

[0683] The invention illustratively described herein suitably can be practiced in the absence of any element or elements, limitation or limitations that are not specifically disclosed herein. Thus, for example, in each instance herein any of the terms “comprising”, “consisting essentially of”, and “consisting of” may be replaced with either of the other two terms. The terms and expressions which have been employed are used as terms of description and not of limitation, and there is no intention that in the use of such terms and expressions of excluding any equivalents of the features shown and described or portions thereof, but it is recognized that various modifications are possible within the scope of the invention claimed. Thus, it should be understood that although the present invention has been specifically disclosed by preferred embodiments, optional features, modification and variation of the concepts herein disclosed may be resorted to by those skilled in the art, and that such modifications and variations are considered to be within the scope of this invention as defined by the description and the appended claims.

[0684] In addition, where features or aspects of the invention are described in terms of Markush groups or other grouping of alternatives, those skilled in the art will recognize that the invention is also thereby described in terms of any individual member or subgroup of members of the Markush group or other group.

TABLE I
SREBP1 Accession Numbers

NM_001005291
Homo sapiens sterol regulatory element binding transcription
factor 1 (SREBF1), transcript variant 1, mRNA
gi|52630418|ref|NM_001005291.1|[52630418]
(SEQ ID NO: 787)
agcagagcug cggccggggg aacccaguuu ccgaggaacu uuucgccggc gccgggccgc
cucugaggcc agggcaggac acgaacgcgc ggagcggcgg cggcgacuga gagccggggc
cgcggcggcg cucccuagga agggccguac gaggcggcgg gcccggcggg ccucccggag
gaggcggcug cgccauggac gagccacccu ucagcgaggc ggcuuuggag caggcgcugg
gcgagccgug cgaucuggac gcggcgcugc ugaccgacau cgaaggugaa gucggcgcgg
ggagggguag ggccaacggc cuggacgccc caagggcggg cgcagaucgc ggagccaugg
auugcacuuu cgaagacaug cuucagcuua ucaacaacca agacagugac uucccuggcc
uauuugaccc acccuaugcu gggagugggg cagggggcac agacccugcc agccccgaua
ccagcucccc aggcagcuug ucuccaccuc cugccacauu gagcuccucu cuugaagccu
uccugagcgg gccgcaggca gcgcccucac cccugucccc uccccagccu gcacccacuc
cauugaagau guacccgucc augcccgcuu ucuccccugg gccugguauc aaggaagagu
cagugccacu gagcauccug cagaccccca ccccacagcc ccugccaggg gcccuccugc
cacagagcuu cccagcccca gccccaccgc aguucagcuc caccccugug uuaggcuacc
ccagcccucc gggaggcuuc ucuacaggaa gcccucccgg gaacacccag cagccgcugc
cuggccugcc acuggcuucc ccgccagggg ucccgcccgu cuccuugcac acccaggucc
agaguguggu cccccagcag cuacugacag ucacagcugc ccccacggca gccccuguaa
cgaccacugu gaccucgcag auccagcagg ucccgguccu gcugcagccc cacuucauca
aggcagacuc gcugcuucug acagccauga agacagacgg agccacugug aaggcggcag
gucucagucc ccuggucucu ggcaccacug ugcagacagg gccuuugccg acccugguga
guggcggaac caucuuggca acagucccac uggucguaga ugcggagaag cugccuauca
accggcucgc agcuggcagc aaggccccgg ccucugccca gagccgugga gagaagcgca
cagcccacaa cgccauugag aagcgcuacc gcuccuccau caaugacaaa aucauugagc
ucaaggaucu gguggugggc acugaggcaa agcugaauaa aucugcuguc uugcgcaagg
ccaucgacua cauucgcuuu cugcaacaca gcaaccagaa acucaagcag gagaaccuaa
gucugcgcac ugcuguccac aaaagcaaau cucugaagga ucuggugucg gccuguggca
guggagggaa cacagacgug cucauggagg gcgugaagac ugagguggag gacacacuga
ccccaccccc cucggaugcu ggcucaccuu uccagagcag ccccuugucc cuuggcagca
ggggcagugg cagcgguggc aguggcagug acucggagcc ugacagccca gucuuugagg
acagcaaggc aaagccagag cagcggccgu cucugcacag ccggggcaug cuggaccgcu
cccgccuggc ccugugcacg cucgucuucc ucugccuguc cugcaacccc uuggccuccu
ugcugggggc ccgggggcuu cccagccccu cagauaccac cagcgucuac cauagcccug
ggcgcaacgu gcugggcacc gagagcagag auggcccugg cugggcccag uggcugcugc
ccccaguggu cuggcugcuc aaugggcugu uggugcucgu cuccuuggug cuucucuuug
ucuacgguga gccagucaca cggccccacu caggccccgc cguguacuuc uggaggcauc
gcaagcaggc ugaccuggac cuggcccggg gagacuuugc ccaggcugcc cagcagcugu
ggcuggcccu gcgggcacug ggccggcccc ugcccaccuc ccaccuggac cuggcuugua
gccuccucug gaaccucauc cgucaccugc ugcagcgucu cugggugggc cgcuggcugg
caggccgggc agggggccug cagcaggacu gugcucugcg aguggaugcu agcgccagcg
cccgagacgc agcccugguc uaccauaagc ugcaccagcu gcacaccaug gggaagcaca
caggcgggca ccucacugcc accaaccugg cgcugagugc ccugaaccug gcagagugug
caggggaugc cgugucugug gcgacgcugg ccgagaucua uguggcggcu gcauugagag
ugaagaccag ucucccacgg gccuugcauu uucugacacg cuucuuccug agcagugccc
gccaggccug ccuggcacag aguggcucag ugccuccugc caugcagugg cucugccacc
ccgugggcca ccguuucuuc guggaugggg acugguccgu gcucaguacc ccaugggaga
gccuguacag cuuggccggg aacccagugg acccccuggc ccaggugacu cagcuauucc
gggaacaucu cuuagagcga gcacugaacu gugugaccca gcccaacccc agcccugggu
cagcugaugg ggacaaggaa uucucggaug cccucgggua ccugcagcug cugaacagcu
guucugaugc ugcgggggcu ccugccuaca gcuucuccau caguuccagc auggccacca
ccaccggcgu agacccggug gccaaguggu gggccucucu gacagcugug gugauccacu
ggcugcggcg ggaugaggag gcggcugagc ggcugugccc gcugguggag caccugcccc
gggugcugca ggagucugag agaccccugc ccagggcagc ucugcacucc uucaaggcug
cccgggcccu gcugggcugu gccaaggcag agucuggucc agccagccug accaucugug
agaaggccag uggguaccug caggacagcc uggcuaccac accagccagc agcuccauug
acaaggccgu gcagcuguuc cugugugacc ugcuucuugu ggugcgcacc agccuguggc
ggcagcagca gcccccggcc ccggccccag cagcccaggg caccagcagc aggccccagg
cuuccgcccu ugagcugcgu ggcuuccaac gggaccugag cagccugagg cggcuggcac
agagcuuccg gcccgccaug cggagggugu uccuacauga ggccacggcc cggcugaugg
cgggggccag ccccacacgg acacaccagc uccucgaccg cagucugagg cggcgggcag
gccccggugg caaaggaggc gcgguggcgg agcuggagcc gcggcccacg cggcgggagc
acgcggaggc cuugcugcug gccuccugcu accugccccc cggcUUccUg ucggcgcccg
ggcagcgcgu gggcaugcug gcugaggcgg cgcgcacacu cgagaagcuu ggcgaucgcc
ggcugcugca cgacugucag cagaugcuca ugcgccuggg cggugggacc acugucacuu
ccagcuagac cccguguccc cggccucagc accccugucu cuagccacuu uggucccgug
cagcuucugu ccugcgucga agcuuugaag gccgaaggca gugcaagaga cucuggccuc
cacaguucga ccugcggcug cugugugccu ucgcggugga aggcccgagg ggcgcgaucu
ugacccuaag accggcggcc augauggugc ugaccucugg uggccgaucg gggcacugca
ggggccgagc cauuuugggg ggccccccuc cuugcucugc aggcaccuua guggcuuuuu
uccuccugug uacagggaag agagggguac auuucccugu gcugacggaa gccaacuugg
cuuucccgga cugcaagcag ggcucugccc cagaggccuc ucucuccguc gugggagaga
gacguguaca uaguguaggu cagcgugcuu agccuccuga ccugaggcuc cugugcuacu
uugccuuuug caaacuuuau uuucauagau ugagaaguuu uguacagaga auuaaaaaug
aaauuauuua uaaucuggaa aaaa
NM_004176
Homo sapiens sterol regulatory element binding transcription
factor 1 (SREBF1), transcript variant 2, mRNA
gi|52630417|ref|NM_004176.3|[52630417]
(SEQ ID NO: 788)
uaacgaggaa cuuuucgccg gcgccgggcc gccucugagg ccagggcagg acacgaacgc
gcggagcggc ggcggcgacu gagagccggg gccgcggcgg cgcucccuag gaagggccgu
acgaggcggc gggcccggcg ggccucccgg aggaggcggc ugcgccaugg acgagccacc
cuucagcgag gcggcuuugg agcaggcgcu gggcgagccg ugcgaucugg acgcggcgcu
gcugaccgac aucgaagaca ugcuucagcu uaucaacaac caagacagug acuucccugg
ccuauuugac ccacccuaug cugggagugg ggcagggggc acagacccug ccagccccga
uaccagcucc ccaggcagcu ugucuccacc uccugccaca uugagcuccu cucuugaagc
cuuccugagc gggccgcagg cagcgcccuc accccugucc ccuccccagc cugcacccac
uccauugaag auguacccgu ccaugcccgc uuucuccccu gggccuggua ucaaggaaga
gucagugcca cugagcaucc ugcagacccc caccccacag ccccugccag gggcccuccu
gccacagagc uucccagccc cagccccacc gcaguucagc uccaccccug uguuaggcua
ccccagcccu ccgggaggcu ucucuacagg aagcccuccc gggaacaccc agcagccgcu
gccuggccug ccacuggcuu ccccgccagg ggucccgccc gucuccuugc acacccaggu
ccagagugug gucccccagc agcuacugac agucacagcu gcccccacgg cagccccugu
aacgaccacu gugaccucgc agauccagca ggucccgguc cugcugcagc cccacuucau
caaggcagac ucgcugcuuc ugacagccau gaagacagac ggagccacug ugaaggcggc
aggucucagu ccccuggucu cuggcaccac ugugcagaca gggccuuugc cgacccuggu
gaguggcgga accaucuugg caacaguccc acuggucgua gaugcggaga agcugccuau
caaccggcuc gcagcuggca gcaaggcccc ggccucugcc cagagccgug gagagaagcg
cacagcccac aacgccauug agaagcgcua ccgcuccucc aucaaugaca aaaucauuga
gcucaaggau cugguggugg gcacugaggc aaagcugaau aaaucugcug ucuugcgcaa
ggccaucgac uacauucgcu uucugcaaca cagcaaccag aaacucaagc aggagaaccu
aagucugcgc acugcugucc acaaaagcaa aucucugaag gaucuggugu cggccugugg
caguggaggg aacacagacg ugcucaugga gggcgugaag acugaggugg aggacacacu
gaccccaccc cccucggaug cuggcucacc uuuccagagc agccccuugu cccuuggcag
caggggcagu ggcagcggug gcaguggcag ugacucggag ccugacagcc cagucuuuga
ggacagcaag gcaaagccag agcagcggcc gucucugcac agccggggca ugcuggaccg
cucccgccug gcccugugca cgcucgucuu ccucugccug uccugcaacc ccuuggccuc
cuugcugggg gcccgggggc uucccagccc cucagauacc accagcgucu accauagccc
ugggcgcaac gugcugggca ccgagagcag agauggcccu ggcugggccc aguggcugcu
gcccccagug gucuggcugc ucaaugggcu guuggugcuc gucuccuugg ugcuucucuu
ugucuacggu gagccaguca cacggcccca cucaggcccc gccguguacu ucuggaggca
ucgcaagcag gcugaccugg accuggcccg gggagacuuu gcccaggcug cccagcagcu
guggcuggcc cugcgggcac ugggccggcc ccugcccacc ucccaccugg accuggcuug
uagccuccuc uggaaccuca uccgucaccu gcugcagcgu cucugggugg gccgcuggcu
ggcaggccgg gcagggggcc ugcagcagga cugugcucug cgaguggaug cuagcgccag
cgcccgagac gcagcccugg ucuaccauaa gcugcaccag cugcacacca uggggaagca
cacaggcggg caccucacug ccaccaaccu ggcgcugagu gcccugaacc uggcagagug
ugcaggggau gccgugucug uggcgacgcu ggccgagauc uauguggcgg cugcauugag
agugaagacc agucucccac gggccuugca uuuucugaca cgcuucuucc ugagcagugc
ccgccaggcc ugccuggcac agaguggcuc agugccuccu gccaugcagu ggcucugcca
ccccgugggc caccguuucu ucguggaugg ggacuggucc gugcucagua ccccauggga
gagccuguac agcuuggccg ggaacccagu ggacccccug gcccagguga cucagcuauu
ccgggaacau cucuuagagc gagcacugaa cugugugacc cagcccaacc ccagcccugg
gucagcugau ggggacaagg aauucucgga ugcccucggg uaccugcagc ugcugaacag
cuguucugau gcugcggggg cuccugccua cagcuucucc aucaguucca gcauggccac
caccaccggc guagacccgg uggccaagug gugggccucu cugacagcug uggugaucca
cuggcugcgg cgggaugagg aggcggcuga gcggcugugc ccgcuggugg agcaccugcc
ccgggugcug caggagucug agagaccccu gcccagggca gcucugcacu ccuucaaggc
ugcccgggcc cugcugggcu gugccaaggc agagucuggu ccagccagcc ugaccaucug
ugagaaggcc aguggguacc ugcaggacag ccuggcuacc acaccagcca gcagcuccau
ugacaaggcc gugcagcugu uccuguguga ccugcuucuu guggugcgca ccagccugug
gcggcagcag cagcccccgg ccccggcccc agcagcccag ggcgccagca gcaggcccca
ggcuuccgcc cuugagcugc guggcuucca acgggaccug agcagccuga ggcggcuggc
acagagcuuc cggcccgcca ugcggagggu guuccuacau gaggccacgg cccggcugau
ggcgggggcc agccccacac ggacacacca gcuccucgac cgcagucuga ggcggcgggc
aggccccggu ggcaaaggag gcgcgguggc ggagcuggag ccgcggccca cgcggcggga
gcacgcggag gccuugcugc uggccuccug cuaccugccc cccggcuucc ugucggcgcc
cgggcagcgc gugggcaugc uggcugaggc ggcgcgcaca cucgagaagc uuggcgaucg
ccggcugcug cacgacuguc agcagaugcu caugcgccug ggcgguggga ccacugucac
uuccagcuag accccguguc cccggccuca gcaccccugu cucuagccac uuuggucccg
ugcagcuucu guccugcguc gaagcuuuga aggccgaagg cagugcaaga gacucuggcc
uccacaguuc gaccugcggc ugcugugugc cuucgcggug gaaggcccga ggggcgcgau
cuugacccua agaccggcgg ccaugauggu gcugaccucu gguggccgau cggggcacug
caggggccga gccauuuugg ggggcccccc uccuugcucu gcaggcaccu uaguggcuuu
uuuccuccug uguacaggga agagaggggu acauuucccu gugcugacgg aagccaacuu
ggcuuucccg gacugcaagc agggcucugc cccagaggcc ucucucuccg ucgugggaga
gagacgugua cauaguguag gucagcgugc uuagccuccu gaccugaggc uccugugcua
cuuugccuuu ugcaaacuuu auuuucauag auugagaagu uuuguacaga gaauuaaaaa
ugaaauuauu uaua
NM_005896
Homo sapiens isocitrate dehydrogenase 1 (NADP+), soluble (IDH1),
mRNA
gi|28178824|ref|NM_005896.2|[28178824]
NM_004599
Homo sapiens sterol regulatory element binding transcription
factor 2 (SREBF2), mRNA
gi|27477112|ref|NM_004599.2|[27477112]
1AM9H
Chain H, Human Srebp-1a Bound To Ldl Receptor Promoter
gi|3318717|pdb|1AM9|H[3318717]
1AM9G
Chain G, Human Srebp-1a Bound To Ldl Receptor Promoter
gi|3318716|pdb|1AM9|G[3318716]
1AM9F
Chain F, Human Srebp-1a Bound To Ldl Receptor Promoter
gi|3318715|pdb|1AM9|F[3318715]
1AM9E
Chain E, Human Srebp-1a Bound To Ldl Receptor Promoter
gi|3318714|pdb|1AM9|E[3318714]
NM_000389
Homo sapiens cyclin-dependent kinase inhibitor 1A (p21, Cip1)
(CDKN1A), transcript variant 1, mRNA
gi|17978496|ref|NM_000389.2|[17978496]
NM_078467
Homo sapiens cyclin-dependent kinase inhibitor 1A (p21, Cip1)
(CDKN1A), transcript variant 2, mRNA
gi|17978494|ref|NM_078467.1|[17978494]
NM_000384
Homo sapiens apolipoprotein B (including Ag(x) antigen) (APOB),
mRNA
gi|105990531|refNM_000384.2|[105990531]
NM_002746
Homo sapiens mitogen-activated protein kinase 3 (MAPK3),
transcript variant 1, mRNA
gi|91718898|ref|NM_002746.2|[91718898]
NM_001040056
Homo sapiens mitogen-activated protein kinase 3 (MAPK3),
transcript variant 2, mRNA
gi|91718896|ref|NM_001040056.1|[91718896]
NM_138957
Homo sapiens mitogen-activated protein kinase 1 (MAPK1),
transcript variant 2, mRNA
gi|75709179|ref|NM_138957.2|[75709179]
NM_002745
Homo sapiens mitogen-activated protein kinase 1 (MAPK1),
transcript variant 1, mRNA
gi|75709178|ref|NM_002745.4|[75709178]
NM_174936
Homo sapiens proprotein convertase subtilisin/kexin type 9
(PCSK9), mRNA
gi|31317306|ref|NM_174936.2|[31317306]
AKO75365
Homo sapiens cDNA PSEC0052 fis, clone NT2RP2000279, weakly
similar to AQUALYSIN I PRECURSOR (EC 3.4.21.-)
gi|22761404|dbj|AK075365.1|[22761404]
AK122717
Homo sapiens cDNA FLJ16214 fis, clone CTONG2024614, weakly
similar to AQUALYSIN I PRECURSOR (EC 3.4.21.-)
gi|34527909|dbj|AK122717.1|[34527909]
BC042095
Homo sapiens proprotein convertase subtilisin/kexin type 9, mRNA
(cDNA clone IMAGE:5767792), partial cds
gi|27694359|gb|BC042095.1|[27694359]
AK124635
Homo sapiens cDNA FLJ42644 fis, clone BRACE3025630
gi|34530476|dbj|AK124635.1|[34530476]
AC091609
Homo sapiens chromosome 1 clone RP11-109I2, complete sequence
gi|15042908|gb|AC091609.2|[15042908]
AY829011
Homo sapiens proprotein convertase subtilisin/kexin type 9
(PCSK9) gene, complete cds
gi|55925153|gb|AY829011.1|[55925153]
AL589790
Human DNA sequence from clone GS1-118I5 on chromosome 1 Contains
the 3′ end of the gene for barttin (BSND) and the 5′ end of the
PCSK9 gene for proprotein convertase subtilisin/kexin type 9,
complete sequence
gi|17973948|emb|AL589790.22|[17973948]

TABLE II
SREBP1 siNA and Target Sequences

| | | | | | | | | |
|---|---|---|---|---|---|---|---|---|
| | | Seq | | | Seq | | | Seq |
| Pos | Seq | ID | UPos | Upper seq | ID | LPos | Lower seq | ID |

hmrSREBP1 (NM_001005291.1)

| | | | | | | | | |
|---|---|---|---|---|---|---|---|---|
| 3 | CAGAGCUGCGGCCGGGGGA | 1 | 3 | CAGAGCUGCGGCCGGGGGA | 1 | 21 | UCCCCCGGCCGCAGCUCUG | 328 |
| 21 | AACCCAGUUUCCGAGGAAC | 2 | 21 | AACCCAGUUUCCGAGGAAC | 2 | 39 | GUUCCUCGGAAACUGGGUU | 329 |
| 39 | CUUUUCGCCGGCGCCGGGC | 3 | 39 | CUUUUCGCCGGCGCCGGGC | 3 | 57 | GCCCGGCGCCGGCGAAAAG | 330 |
| 57 | CCGCCUCUGAGGCCAGGGC | 4 | 57 | CCGCCUCUGAGGCCAGGGC | 4 | 75 | GCCCUGGCCUCAGAGGCGG | 331 |
| 75 | CAGGACACGAACGCGCGGA | 5 | 75 | CAGGACACGAACGCGCGGA | 5 | 93 | UCCGCGCGUUCGUGUCCUG | 332 |
| 93 | AGCGGCGGCGGCGACUGAG | 6 | 93 | AGCGGCGGCGGCGACUGAG | 6 | 111 | CUCAGUCGCCGCCGCCGCU | 333 |
| 111 | GAGCCGGGGCCGCGGCGGC | 7 | 111 | GAGCCGGGGCCGCGGCGGC | 7 | 129 | GCCGCCGCGGCCCCGGCUC | 334 |
| 129 | CGCUCCCUAGGAAGGGCCG | 8 | 129 | CGCUCCCUAGGAAGGGCCG | 8 | 147 | CGGCCCUUCCUAGGGAGCG | 335 |
| 147 | GUACGAGGCGGCGGGCCCG | 9 | 147 | GUACGAGGCGGCGGGCCCG | 9 | 165 | CGGGCCCGCCGCCUCGUAC | 336 |
| 165 | GGCGGGCCUCCCGGAGGAG | 10 | 165 | GGCGGGCCUCCCGGAGGAG | 10 | 183 | CUCCUCCGGGAGGCCCGCC | 337 |
| 183 | GGCGGCUGCGCCAUGGACG | 11 | 183 | GGCGGCUGCGCCAUGGACG | 11 | 201 | CGUCCAUGGCGCAGCCGCC | 338 |
| 201 | GAGCCACCCUUCAGCGAGG | 12 | 201 | GAGCCACCCUUCAGCGAGG | 12 | 219 | CCUCGCUGAAGGGUGGCUC | 339 |
| 219 | GCGGCUUUGGAGCAGGCGC | 13 | 219 | GCGGCUUUGGAGCAGGCGC | 13 | 237 | GCGCCUGCUCCAAAGCCGC | 340 |
| 237 | CUGGGCGAGCCGUGCGAUC | 14 | 237 | CUGGGCGAGCCGUGCGAUC | 14 | 255 | GAUCGCACGGCUCGCCCAG | 341 |
| 255 | CUGGACGCGGCGCUGCUGA | 15 | 255 | CUGGACGCGGCGCUGCUGA | 15 | 273 | UCAGCAGCGCCGCGUCCAG | 342 |
| 273 | ACCGACAUCGAAGGUGAAG | 16 | 273 | ACCGACAUCGAAGGUGAAG | 16 | 291 | CUUCACCUUCGAUGUCGGU | 343 |
| 291 | GUCGGCGCGGGGAGGGGUA | 17 | 291 | GUCGGCGCGGGGAGGGGUA | 17 | 309 | UACCCCUCCCCGCGCCGAC | 344 |
| 309 | AGGGCCAACGGCCUGGACG | 18 | 309 | AGGGCCAACGGCCUGGACG | 18 | 327 | CGUCCAGGCCGUUGGCCCU | 345 |
| 327 | GCCCCAAGGGCGGGCGCAG | 19 | 327 | GCCCCAAGGGCGGGCGCAG | 19 | 345 | CUGCGCCCGCCCUUGGGGC | 346 |
| 345 | GAUCGCGGAGCCAUGGAUU | 20 | 345 | GAUCGCGGAGCCAUGGAUU | 20 | 363 | AAUCCAUGGCUCCGCGAUC | 347 |
| 363 | UGCACUUUCGAAGACAUGC | 21 | 363 | UGCACUUUCGAAGACAUGC | 21 | 381 | GCAUGUCUUCGAAAGUGCA | 348 |
| 381 | CUUCAGCUUAUCAACAACC | 22 | 381 | CUUCAGCUUAUCAACAACC | 22 | 399 | GGUUGUUGAUAAGCUGAAG | 349 |
| 399 | CAAGACAGUGACUUCCCUG | 23 | 399 | CAAGACAGUGACUUCCCUG | 23 | 417 | CAGGGAAGUCACUGUCUUG | 350 |
| 417 | GGCCUAUUUGACCCACCCU | 24 | 417 | GGCCUAUUUGACCCACCCU | 24 | 435 | AGGGUGGGUCAAAUAGGCC | 351 |
| 435 | UAUGCUGGGAGUGGGGCAG | 25 | 435 | UAUGCUGGGAGUGGGGCAG | 25 | 453 | CUGCCCCACUCCCAGCAUA | 352 |
| 453 | GGGGGCACAGACCCUGCCA | 26 | 453 | GGGGGCACAGACCCUGCCA | 26 | 471 | UGGCAGGGUCUGUGCCCCC | 353 |
| 471 | AGCCCCGAUACCAGCUCCC | 27 | 471 | AGCCCCGAUACCAGCUCCC | 27 | 489 | GGGAGCUGGUAUCGGGGCU | 354 |
| 489 | CCAGGCAGCUUGUCUCCAC | 28 | 489 | CCAGGCAGCUUGUCUCCAC | 28 | 507 | GUGGAGACAAGCUGCCUGG | 355 |
| 507 | CCUCCUGCCACAUUGAGCU | 29 | 507 | CCUCCUGCCACAUUGAGCU | 29 | 525 | AGCUCAAUGUGGCAGGAGG | 356 |
| 525 | UCCUCUCUUGAAGCCUUCC | 30 | 525 | UCCUCUCUUGAAGCCUUCC | 30 | 543 | GGAAGGCUUCAAGAGAGGA | 357 |
| 543 | CUGAGCGGGCCGCAGGCAG | 31 | 543 | CUGAGCGGGCCGCAGGCAG | 31 | 561 | CUGCCUGCGGCCCGCUCAG | 358 |
| 561 | GCGCCCUCACCCCUGUCCC | 32 | 561 | GCGCCCUCACCCCUGUCCC | 32 | 579 | GGGACAGGGGUGAGGGCGC | 359 |
| 579 | CCUCCCCAGCCUGCACCCA | 33 | 579 | CCUCCCCAGCCUGCACCCA | 33 | 597 | UGGGUGCAGGCUGGGGAGG | 360 |
| 597 | ACUCCAUUGAAGAUGUACC | 34 | 597 | ACUCCAUUGAAGAUGUACC | 34 | 615 | GGUACAUCUUCAAUGGAGU | 361 |
| 615 | CCGUCCAUGCCCGCUUUCU | 35 | 615 | CCGUCCAUGCCCGCUUUCU | 35 | 633 | AGAAAGCGGGCAUGGACGG | 362 |
| 633 | UCCCCUGGGCCUGGUAUCA | 36 | 633 | UCCCCUGGGCCUGGUAUCA | 36 | 651 | UGAUACCAGGCCCAGGGGA | 363 |
| 651 | AAGGAAGAGUCAGUGCCAC | 37 | 651 | AAGGAAGAGUCAGUGCCAC | 37 | 669 | GUGGCACUGACUCUUCCUU | 364 |
| 669 | CUGAGCAUCCUGCAGACCC | 38 | 669 | CUGAGCAUCCUGCAGACCC | 38 | 687 | GGGUCUGCAGGAUGCUCAG | 365 |
| 687 | CCCACCCCACAGCCCCUGC | 39 | 687 | CCCACCCCACAGCCCCUGC | 39 | 705 | GCAGGGGCUGUGGGGUGGG | 366 |
| 705 | CCAGGGGCCCUCCUGCCAC | 40 | 705 | CCAGGGGCCCUCCUGCCAC | 40 | 723 | GUGGCAGGAGGGCCCCUGG | 367 |
| 723 | CAGAGCUUCCCAGCCCCAG | 41 | 723 | CAGAGCUUCCCAGCCCCAG | 41 | 741 | CUGGGGCUGGGAAGCUCUG | 368 |
| 741 | GCCCCACCGCAGUUCAGCU | 42 | 741 | GCCCCACCGCAGUUCAGCU | 42 | 759 | AGCUGAACUGCGGUGGGGC | 369 |
| 759 | UCCACCCCUGUGUUAGGCU | 43 | 759 | UCCACCCCUGUGUUAGGCU | 43 | 777 | AGCCUAACACAGGGGUGGA | 370 |
| 777 | UACCCCAGCCCUCCGGGAG | 44 | 777 | UACCCCAGCCCUCCGGGAG | 44 | 795 | CUCCCGGAGGGCUGGGGUA | 371 |
| 795 | GGCUUCUCUACAGGAAGCC | 45 | 795 | GGCUUCUCUACAGGAAGCC | 45 | 813 | GGCUUCCUGUAGAGAAGCC | 372 |
| 813 | CCUCCCGGGAACACCCAGC | 46 | 813 | CCUCCCGGGAACACCCAGC | 46 | 831 | GCUGGGUGUUCCCGGGAGG | 373 |
| 831 | CAGCCGCUGCCUGGCCUGC | 47 | 831 | CAGCCGCUGCCUGGCCUGC | 47 | 849 | GCAGGCCAGGCAGCGGCUG | 374 |
| 849 | CCACUGGCUUCCCCGCCAG | 48 | 849 | CCACUGGCUUCCCCGCCAG | 48 | 867 | CUGGCGGGGAAGCCAGUGG | 375 |
| 867 | GGGGUCCCGCCCGUCUCCU | 49 | 867 | GGGGUCCCGCCCGUCUCCU | 49 | 885 | AGGAGACGGGCGGGACCCC | 376 |
| 885 | UUGCACACCCAGGUCCAGA | 50 | 885 | UUGCACACCCAGGUCCAGA | 50 | 903 | UCUGGACCUGGGUGUGCAA | 377 |
| 903 | AGUGUGGUCCCCCAGCAGC | 51 | 903 | AGUGUGGUCCCCCAGCAGC | 51 | 921 | GCUGCUGGGGGACCACACU | 378 |
| 921 | CUACUGACAGUCACAGCUG | 52 | 921 | CUACUGACAGUCACAGCUG | 52 | 939 | CAGCUGUGACUGUCAGUAG | 379 |
| 939 | GCCCCCACGGCAGCCCCUG | 53 | 939 | GCCCCCACGGCAGCCCCUG | 53 | 957 | CAGGGGCUGCCGUGGGGGC | 380 |
| 957 | GUAACGACCACUGUGACCU | 54 | 957 | GUAACGACCACUGUGACCU | 54 | 975 | AGGUCACAGUGGUCGUUAC | 381 |
| 975 | UCGCAGAUCCAGCAGGUCC | 55 | 975 | UCGCAGAUCCAGCAGGUCC | 55 | 993 | GGACCUGCUGGAUCUGCGA | 382 |
| 993 | CCGGUCCUGCUGCAGCCCC | 56 | 993 | CCGGUCCUGCUGCAGCCCC | 56 | 1011 | GGGGCUGCAGCAGGACCGG | 383 |
| 1011 | CACUUCAUCAAGGCAGACU | 57 | 1011 | CACUUCAUCAAGGCAGACU | 57 | 1029 | AGUCUGCCUUGAUGAAGUG | 384 |
| 1029 | UCGCUGCUUCUGACAGCCA | 58 | 1029 | UCGCUGCUUCUGACAGCCA | 58 | 1047 | UGGCUGUCAGAAGCAGCGA | 385 |
| 1047 | AUGAAGACAGACGGAGCCA | 59 | 1047 | AUGAAGACAGACGGAGCCA | 59 | 1065 | UGGCUCCGUCUGUCUUCAU | 386 |
| 1065 | ACUGUGAAGGCGGCAGGUC | 60 | 1065 | ACUGUGAAGGCGGCAGGUC | 60 | 1083 | GACCUGCCGCCUUCACAGU | 387 |
| 1083 | CUCAGUCCCCUGGUCUCUG | 61 | 1083 | CUCAGUCCCCUGGUCUCUG | 61 | 1101 | CAGAGACCAGGGGACUGAG | 388 |
| 1101 | GGCACCACUGUGCAGACAG | 62 | 1101 | GGCACCACUGUGCAGACAG | 62 | 1119 | CUGUCUGCACAGUGGUGCC | 389 |
| 1119 | GGGCCUUUGCCGACCCUGG | 63 | 1119 | GGGCCUUUGCCGACCCUGG | 63 | 1137 | CCAGGGUCGGCAAAGGCCC | 390 |
| 1137 | GUGAGUGGCGGAACCAUCU | 64 | 1137 | GUGAGUGGCGGAACCAUCU | 64 | 1155 | AGAUGGUUCCGCCACUCAC | 391 |
| 1155 | UUGGCAACAGUCCCACUGG | 65 | 1155 | UUGGCAACAGUCCCACUGG | 65 | 1173 | CCAGUGGGACUGUUGCCAA | 392 |
| 1173 | GUCGUAGAUGCGGAGAAGC | 66 | 1173 | GUCGUAGAUGCGGAGAAGC | 66 | 1191 | GCUUCUCCGCAUCUACGAC | 393 |
| 1191 | CUGCCUAUCAACCGGCUCG | 67 | 1191 | CUGCCUAUCAACCGGCUCG | 67 | 1209 | CGAGCCGGUUGAUAGGCAG | 394 |
| 1209 | GCAGCUGGCAGCAAGGCCC | 68 | 1209 | GCAGCUGGCAGCAAGGCCC | 68 | 1227 | GGGCCUUGCUGCCAGCUGC | 395 |
| 1227 | CCGGCCUCUGCCCAGAGCC | 69 | 1227 | CCGGCCUCUGCCCAGAGCC | 69 | 1245 | GGCUCUGGGCAGAGGCCGG | 396 |
| 1245 | CGUGGAGAGAAGCGCACAG | 70 | 1245 | CGUGGAGAGAAGCGCACAG | 70 | 1263 | CUGUGCGCUUCUCUCCACG | 397 |
| 1263 | GCCCACAACGCCAUUGAGA | 71 | 1263 | GCCCACAACGCCAUUGAGA | 71 | 1281 | UCUCAAUGGCGUUGUGGGC | 398 |
| 1281 | AAGCGCUACCGCUCCUCCA | 72 | 1281 | AAGCGCUACCGCUCCUCCA | 72 | 1299 | UGGAGGAGCGGUAGCGCUU | 399 |
| 1299 | AUCAAUGACAAAAUCAUUG | 73 | 1299 | AUCAAUGACAAAAUCAUUG | 73 | 1317 | CAAUGAUUUUGUCAUUGAU | 400 |
| 1317 | GAGCUCAAGGAUCUGGUGG | 74 | 1317 | GAGCUCAAGGAUCUGGUGG | 74 | 1335 | CCACCAGAUCCUUGAGCUC | 401 |
| 1335 | GUGGGCACUGAGGCAAAGC | 75 | 1335 | GUGGGCACUGAGGCAAAGC | 75 | 1353 | GCUUUGCCUCAGUGCCCAC | 402 |
| 1353 | CUGAAUAAAUCUGCUGUCU | 76 | 1353 | CUGAAUAAAUCUGCUGUCU | 76 | 1371 | AGACAGCAGAUUUAUUCAG | 403 |
| 1371 | UUGCGCAAGGCCAUCGACU | 77 | 1371 | UUGCGCAAGGCCAUCGACU | 77 | 1389 | AGUCGAUGGCCUUGCGCAA | 404 |
| 1389 | UACAUUCGCUUUCUGCAAC | 78 | 1389 | UACAUUCGCUUUCUGCAAC | 78 | 1407 | GUUGCAGAAAGCGAAUGUA | 405 |
| 1407 | CACAGCAACCAGAAACUCA | 79 | 1407 | CACAGCAACCAGAAACUCA | 79 | 1425 | UGAGUUUCUGGUUGCUGUG | 406 |
| 1425 | AAGCAGGAGAACCUAAGUC | 80 | 1425 | AAGCAGGAGAACCUAAGUC | 80 | 1443 | GACUUAGGUUCUCCUGCUU | 407 |
| 1443 | CUGCGCACUGCUGUCCACA | 81 | 1443 | CUGCGCACUGCUGUCCACA | 81 | 1461 | UGUGGACAGCAGUGCGCAG | 408 |
| 1461 | AAAAGCAAAUCUCUGAAGG | 82 | 1461 | AAAAGCAAAUCUCUGAAGG | 82 | 1479 | CCUUCAGAGAUUUGCUUUU | 409 |
| 1479 | GAUCUGGUGUCGGCCUGUG | 83 | 1479 | GAUCUGGUGUCGGCCUGUG | 83 | 1497 | CACAGGCCGACACCAGAUC | 410 |
| 1497 | GGCAGUGGAGGGAACACAG | 84 | 1497 | GGCAGUGGAGGGAACACAG | 84 | 1515 | CUGUGUUCCCUCCACUGCC | 411 |
| 1515 | GACGUGCUCAUGGAGGGCG | 85 | 1515 | GACGUGCUCAUGGAGGGCG | 85 | 1533 | CGCCCUCCAUGAGCACGUC | 412 |
| 1533 | GUGAAGACUGAGGUGGAGG | 86 | 1533 | GUGAAGACUGAGGUGGAGG | 86 | 1551 | CCUCCACCUCAGUCUUCAC | 413 |
| 1551 | GACACACUGACCCCACCCC | 87 | 1551 | GACACACUGACCCCACCCC | 87 | 1569 | GGGGUGGGGUCAGUGUGUC | 414 |
| 1569 | CCCUCGGAUGCUGGCUCAC | 88 | 1569 | CCCUCGGAUGCUGGCUCAC | 88 | 1587 | GUGAGCCAGCAUCCGAGGG | 415 |
| 1587 | CCUUUCCAGAGCAGCCCCU | 89 | 1587 | CCUUUCCAGAGCAGCCCCU | 89 | 1605 | AGGGGCUGCUCUGGAAAGG | 416 |
| 1605 | UUGUCCCUUGGCAGCAGGG | 90 | 1605 | UUGUCCCUUGGCAGCAGGG | 90 | 1623 | CCCUGCUGCCAAGGGACAA | 417 |
| 1623 | GGCAGUGGCAGCGGUGGCA | 91 | 1623 | GGCAGUGGCAGCGGUGGCA | 91 | 1641 | UGCCACCGCUGCCACUGCC | 418 |
| 1641 | AGUGGCAGUGACUCGGAGC | 92 | 1641 | AGUGGCAGUGACUCGGAGC | 92 | 1659 | GCUCCGAGUCACUGCCACU | 419 |
| 1659 | CCUGACAGCCCAGUCUUUG | 93 | 1659 | CCUGACAGCCCAGUCUUUG | 93 | 1677 | CAAAGACUGGGCUGUCAGG | 420 |
| 1677 | GAGGACAGCAAGGCAAAGC | 94 | 1677 | GAGGACAGCAAGGCAAAGC | 94 | 1695 | GCUUUGCCUUGCUGUCCUC | 421 |
| 1695 | CCAGAGCAGCGGCCGUCUC | 95 | 1695 | CCAGAGCAGCGGCCGUCUC | 95 | 1713 | GAGACGGCCGCUGCUCUGG | 422 |
| 1713 | CUGCACAGCCGGGGCAUGC | 96 | 1713 | CUGCACAGCCGGGGCAUGC | 96 | 1731 | GCAUGCCCCGGCUGUGCAG | 423 |
| 1731 | CUGGACCGCUCCCGCCUGG | 97 | 1731 | CUGGACCGCUCCCGCCUGG | 97 | 1749 | CCAGGCGGGAGCGGUCCAG | 424 |
| 1749 | GCCCUGUGCACGCUCGUCU | 98 | 1749 | GCCCUGUGCACGCUCGUCU | 98 | 1767 | AGACGAGCGUGCACAGGGC | 425 |
| 1767 | UUCCUCUGCCUGUCCUGCA | 99 | 1767 | UUCCUCUGCCUGUCCUGCA | 99 | 1785 | UGCAGGACAGGCAGAGGAA | 426 |
| 1785 | AACCCCUUGGCCUCCUUGC | 100 | 1785 | AACCCCUUGGCCUCCUUGC | 100 | 1803 | GCAAGGAGGCCAAGGGGUU | 427 |
| 1803 | CUGGGGGCCCGGGGGCUUC | 101 | 1803 | CUGGGGGCCCGGGGGCUUC | 101 | 1821 | GAAGCCCCCGGGCCCCCAG | 428 |
| 1821 | CCCAGCCCCUCAGAUACCA | 102 | 1821 | CCCAGCCCCUCAGAUACCA | 102 | 1839 | UGGUAUCUGAGGGGCUGGG | 429 |
| 1839 | ACCAGCGUCUACCAUAGCC | 103 | 1839 | ACCAGCGUCUACCAUAGCC | 103 | 1857 | GGCUAUGGUAGACGCUGGU | 430 |
| 1857 | CCUGGGCGCAACGUGCUGG | 104 | 1857 | CCUGGGCGCAACGUGCUGG | 104 | 1875 | CCAGCACGUUGCGCCCAGG | 431 |
| 1875 | GGCACCGAGAGCAGAGAUG | 105 | 1875 | GGCACCGAGAGCAGAGAUG | 105 | 1893 | CAUCUCUGCUCUCGGUGCC | 432 |
| 1893 | GGCCCUGGCUGGGCCCAGU | 106 | 1893 | GGCCCUGGCUGGGCCCAGU | 106 | 1911 | ACUGGGCCCAGCCAGGGCC | 433 |
| 1911 | UGGCUGCUGCCCCCAGUGG | 107 | 1911 | UGGCUGCUGCCCCCAGUGG | 107 | 1929 | CCACUGGGGGCAGCAGCCA | 434 |
| 1929 | GUCUGGCUGCUCAAUGGGC | 108 | 1929 | GUCUGGCUGCUCAAUGGGC | 108 | 1947 | GCCCAUUGAGCAGCCAGAC | 435 |
| 1947 | CUGUUGGUGCUCGUCUCCU | 109 | 1947 | CUGUUGGUGCUCGUCUCCU | 109 | 1965 | AGGAGACGAGCACCAACAG | 436 |
| 1965 | UUGGUGCUUCUCUUUGUCU | 110 | 1965 | UUGGUGCUUCUCUUUGUCU | 110 | 1983 | AGACAAAGAGAAGCACCAA | 437 |
| 1983 | UACGGUGAGCCAGUCACAC | 111 | 1983 | UACGGUGAGCCAGUCACAC | 111 | 2001 | GUGUGACUGGCUCACCGUA | 438 |
| 2001 | CGGCCCCACUCAGGCCCCG | 112 | 2001 | CGGCCCCACUCAGGCCCCG | 112 | 2019 | CGGGGCCUGAGUGGGGCCG | 439 |
| 2019 | GCCGUGUACUUCUGGAGGC | 113 | 2019 | GCCGUGUACUUCUGGAGGC | 113 | 2037 | GCCUCCAGAAGUACACGGC | 440 |
| 2037 | CAUCGCAAGCAGGCUGACC | 114 | 2037 | CAUCGCAAGCAGGCUGACC | 114 | 2055 | GGUCAGCCUGCUUGCGAUG | 441 |
| 2055 | CUGGACCUGGCCCGGGGAG | 115 | 2055 | CUGGACCUGGCCCGGGGAG | 115 | 2073 | CUCCCCGGGCCAGGUCCAG | 442 |
| 2073 | GACUUUGCCCAGGCUGCCC | 116 | 2073 | GACUUUGCCCAGGCUGCCC | 116 | 2091 | GGGCAGCCUGGGCAAAGUC | 443 |
| 2091 | CAGCAGCUGUGGCUGGCCC | 117 | 2091 | CAGCAGCUGUGGCUGGCCC | 117 | 2109 | GGGCCAGCCACAGCUGCUG | 444 |
| 2109 | CUGCGGGCACUGGGCCGGC | 118 | 2109 | CUGCGGGCACUGGGCCGGC | 118 | 2127 | GCCGGCCCAGUGCCCGCAG | 445 |
| 2127 | CCCCUGCCCACCUCCCACC | 119 | 2127 | CCCCUGCCCACCUCCCACC | 119 | 2145 | GGUGGGAGGUGGGCAGGGG | 446 |
| 2145 | CUGGACCUGGCUUGUAGCC | 120 | 2145 | CUGGACCUGGCUUGUAGCC | 120 | 2163 | GGCUACAAGCCAGGUCCAG | 447 |
| 2163 | CUCCUCUGGAACCUCAUCC | 121 | 2163 | CUCCUCUGGAACCUCAUCC | 121 | 2181 | GGAUGAGGUUCCAGAGGAG | 448 |
| 2181 | CGUCACCUGCUGCAGCGUC | 122 | 2181 | CGUCACCUGCUGCAGCGUC | 122 | 2199 | GACGCUGCAGCAGGUGACG | 449 |
| 2199 | CUCUGGGUGGGCCGCUGGC | 123 | 2199 | CUCUGGGUGGGCCGCUGGC | 123 | 2217 | GCCAGCGGCCCACCCAGAG | 450 |
| 2217 | CUGGCAGGCCGGGCAGGGG | 124 | 2217 | CUGGCAGGCCGGGCAGGGG | 124 | 2235 | CCCCUGCCCGGCCUGCCAG | 451 |
| 2235 | GGCCUGCAGCAGGACUGUG | 125 | 2235 | GGCCUGCAGCAGGACUGUG | 125 | 2253 | CACAGUCCUGCUGCAGGCC | 452 |
| 2253 | GCUCUGCGAGUGGAUGCUA | 126 | 2253 | GCUCUGCGAGUGGAUGCUA | 126 | 2271 | UAGCAUCCACUCGCAGAGC | 453 |
| 2271 | AGCGCCAGCGCCCGAGACG | 127 | 2271 | AGCGCCAGCGCCCGAGACG | 127 | 2289 | CGUCUCGGGCGCUGGCGCU | 454 |
| 2289 | GCAGCCCUGGUCUACCAUA | 128 | 2289 | GCAGCCCUGGUCUACCAUA | 128 | 2307 | UAUGGUAGACCAGGGCUGC | 455 |
| 2307 | AAGCUGCACCAGCUGCACA | 129 | 2307 | AAGCUGCACCAGCUGCACA | 129 | 2325 | UGUGCAGCUGGUGCAGCUU | 456 |
| 2325 | ACCAUGGGGAAGCACACAG | 130 | 2325 | ACCAUGGGGAAGCACACAG | 130 | 2343 | CUGUGUGCUUCCCCAUGGU | 457 |
| 2343 | GGCGGGCACCUCACUGCCA | 131 | 2343 | GGCGGGCACCUCACUGCCA | 131 | 2361 | UGGCAGUGAGGUGCCCGCC | 458 |
| 2361 | ACCAACCUGGCGCUGAGUG | 132 | 2361 | ACCAACCUGGCGCUGAGUG | 132 | 2379 | CACUCAGCGCCAGGUUGGU | 459 |
| 2379 | GCCCUGAACCUGGCAGAGU | 133 | 2379 | GCCCUGAACCUGGCAGAGU | 133 | 2397 | ACUCUGCCAGGUUCAGGGC | 460 |
| 2397 | UGUGCAGGGGAUGCCGUGU | 134 | 2397 | UGUGCAGGGGAUGCCGUGU | 134 | 2415 | ACACGGCAUCCCCUGCACA | 461 |
| 2415 | UCUGUGGCGACGCUGGCCG | 135 | 2415 | UCUGUGGCGACGCUGGCCG | 135 | 2433 | CGGCCAGCGUCGCCACAGA | 462 |
| 2433 | GAGAUCUAUGUGGCGGCUG | 136 | 2433 | GAGAUCUAUGUGGCGGCUG | 136 | 2451 | CAGCCGCCACAUAGAUCUC | 463 |
| 2451 | GCAUUGAGAGUGAAGACCA | 137 | 2451 | GCAUUGAGAGUGAAGACCA | 137 | 2469 | UGGUCUUCACUCUCAAUGC | 464 |
| 2469 | AGUCUCCCACGGGCCUUGC | 138 | 2469 | AGUCUCCCACGGGCCUUGC | 138 | 2487 | GCAAGGCCCGUGGGAGACU | 465 |
| 2487 | CAUUUUCUGACACGCUUCU | 139 | 2487 | CAUUUUCUGACACGCUUCU | 139 | 2505 | AGAAGCGUGUCAGAAAAUG | 466 |
| 2505 | UUCCUGAGCAGUGCCCGCC | 140 | 2505 | UUCCUGAGCAGUGCCCGCC | 140 | 2523 | GGCGGGCACUGCUCAGGAA | 467 |
| 2523 | CAGGCCUGCCUGGCACAGA | 141 | 2523 | CAGGCCUGCCUGGCACAGA | 141 | 2541 | UCUGUGCCAGGCAGGCCUG | 468 |
| 2541 | AGUGGCUCAGUGCCUCCUG | 142 | 2541 | AGUGGCUCAGUGCCUCCUG | 142 | 2559 | CAGGAGGCACUGAGCCACU | 469 |
| 2559 | GCCAUGCAGUGGCUCUGCC | 143 | 2559 | GCCAUGCAGUGGCUCUGCC | 143 | 2577 | GGCAGAGCCACUGCAUGGC | 470 |
| 2577 | CACCCCGUGGGCCACCGUU | 144 | 2577 | CACCCCGUGGGCCACCGUU | 144 | 2595 | AACGGUGGCCCACGGGGUG | 471 |
| 2595 | UUCUUCGUGGAUGGGGACU | 145 | 2595 | UUCUUCGUGGAUGGGGACU | 145 | 2613 | AGUCCCCAUCCACGAAGAA | 472 |
| 2613 | UGGUCCGUGCUCAGUACCC | 146 | 2613 | UGGUCCGUGCUCAGUACCC | 146 | 2631 | GGGUACUGAGCACGGACCA | 473 |
| 2631 | CCAUGGGAGAGCCUGUACA | 147 | 2631 | CCAUGGGAGAGCCUGUACA | 147 | 2649 | UGUACAGGCUCUCCCAUGG | 474 |
| 2649 | AGCUUGGCCGGGAACCCAG | 148 | 2649 | AGCUUGGCCGGGAACCCAG | 148 | 2667 | CUGGGUUCCCGGCCAAGCU | 475 |
| 2667 | GUGGACCCCCUGGCCCAGG | 149 | 2667 | GUGGACCCCCUGGCCCAGG | 149 | 2685 | CCUGGGCCAGGGGGUCCAC | 476 |
| 2685 | GUGACUCAGCUAUUCCGGG | 150 | 2685 | GUGACUCAGCUAUUCCGGG | 150 | 2703 | CCCGGAAUAGCUGAGUCAC | 477 |
| 2703 | GAACAUCUCUUAGAGCGAG | 151 | 2703 | GAACAUCUCUUAGAGCGAG | 151 | 2721 | CUCGCUCUAAGAGAUGUUC | 478 |
| 2721 | GCACUGAACUGUGUGACCC | 152 | 2721 | GCACUGAACUGUGUGACCC | 152 | 2739 | GGGUCACACAGUUCAGUGC | 479 |
| 2739 | CAGCCCAACCCCAGCCCUG | 153 | 2739 | CAGCCCAACCCCAGCCCUG | 153 | 2757 | CAGGGCUGGGGUUGGGCUG | 480 |
| 2757 | GGGUCAGCUGAUGGGGACA | 154 | 2757 | GGGUCAGCUGAUGGGGACA | 154 | 2775 | UGUCCCCAUCAGCUGACCC | 481 |
| 2775 | AAGGAAUUCUCGGAUGCCC | 155 | 2775 | AAGGAAUUCUCGGAUGCCC | 155 | 2793 | GGGCAUCCGAGAAUUCCUU | 482 |
| 2793 | CUCGGGUACCUGCAGCUGC | 156 | 2793 | CUCGGGUACCUGCAGCUGC | 156 | 2811 | GCAGCUGCAGGUACCCGAG | 483 |
| 2811 | CUGAACAGCUGUUCUGAUG | 157 | 2811 | CUGAACAGCUGUUCUGAUG | 157 | 2829 | CAUCAGAACAGCUGUUCAG | 484 |
| 2829 | GCUGCGGGGGCUCCUGCCU | 158 | 2829 | GCUGCGGGGGCUCCUGCCU | 158 | 2847 | AGGCAGGAGCCCCCGCAGC | 485 |
| 2847 | UACAGCUUCUCCAUCAGUU | 159 | 2847 | UACAGCUUCUCCAUCAGUU | 159 | 2865 | AACUGAUGGAGAAGCUGUA | 486 |
| 2865 | UCCAGCAUGGCCACCACCA | 160 | 2865 | UCCAGCAUGGCCACCACCA | 160 | 2883 | UGGUGGUGGCCAUGCUGGA | 487 |
| 2883 | ACCGGCGUAGACCCGGUGG | 161 | 2883 | ACCGGCGUAGACCCGGUGG | 161 | 2901 | CCACCGGGUCUACGCCGGU | 488 |
| 2901 | GCCAAGUGGUGGGCCUCUC | 162 | 2901 | GCCAAGUGGUGGGCCUCUC | 162 | 2919 | GAGAGGCCCACCACUUGGC | 489 |
| 2919 | CUGACAGCUGUGGUGAUCC | 163 | 2919 | CUGACAGCUGUGGUGAUCC | 163 | 2937 | GGAUCACCACAGCUGUCAG | 490 |
| 2937 | CACUGGCUGCGGCGGGAUG | 164 | 2937 | CACUGGCUGCGGCGGGAUG | 164 | 2955 | CAUCCCGCCGCAGCCAGUG | 491 |
| 2955 | GAGGAGGCGGCUGAGCGGC | 165 | 2955 | GAGGAGGCGGCUGAGCGGC | 165 | 2973 | GCCGCUCAGCCGCCUCCUC | 492 |
| 2973 | CUGUGCCCGCUGGUGGAGC | 166 | 2973 | CUGUGCCCGCUGGUGGAGC | 166 | 2991 | GCUCCACCAGCGGGCACAG | 493 |
| 2991 | CACCUGCCCCGGGUGCUGC | 167 | 2991 | CACCUGCCCCGGGUGCUGC | 167 | 3009 | GCAGCACCCGGGGCAGGUG | 494 |
| 3009 | CAGGAGUCUGAGAGACCCC | 168 | 3009 | CAGGAGUCUGAGAGACCCC | 168 | 3027 | GGGGUCUCUCAGACUCCUG | 495 |
| 3027 | CUGCCCAGGGCAGCUCUGC | 169 | 3027 | CUGCCCAGGGCAGCUCUGC | 169 | 3045 | GCAGAGCUGCCCUGGGCAG | 496 |
| 3045 | CACUCCUUCAAGGCUGCCC | 170 | 3045 | CACUCCUUCAAGGCUGCCC | 170 | 3063 | GGGCAGCCUUGAAGGAGUG | 497 |
| 3063 | CGGGCCCUGCUGGGCUGUG | 171 | 3063 | CGGGCCCUGCUGGGCUGUG | 171 | 3081 | CACAGCCCAGCAGGGCCCG | 498 |
| 3081 | GCCAAGGCAGAGUCUGGUC | 172 | 3081 | GCCAAGGCAGAGUCUGGUC | 172 | 3099 | GACCAGACUCUGCCUUGGC | 499 |
| 3099 | CCAGCCAGCCUGACCAUCU | 173 | 3099 | CCAGCCAGCCUGACCAUCU | 173 | 3117 | AGAUGGUCAGGCUGGCUGG | 500 |
| 3117 | UGUGAGAAGGCCAGUGGGU | 174 | 3117 | UGUGAGAAGGCCAGUGGGU | 174 | 3135 | ACCCACUGGCCUUCUCACA | 501 |
| 3135 | UACCUGCAGGACAGCCUGG | 175 | 3135 | UACCUGCAGGACAGCCUGG | 175 | 3153 | CCAGGCUGUCCUGCAGGUA | 502 |
| 3153 | GCUACCACACCAGCCAGCA | 176 | 3153 | GCUACCACACCAGCCAGCA | 176 | 3171 | UGCUGGCUGGUGUGGUAGC | 503 |
| 3171 | AGCUCCAUUGACAAGGCCG | 177 | 3171 | AGCUCCAUUGACAAGGCCG | 177 | 3189 | CGGCCUUGUCAAUGGAGCU | 504 |
| 3189 | GUGCAGCUGUUCCUGUGUG | 178 | 3189 | GUGCAGCUGUUCCUGUGUG | 178 | 3207 | CACACAGGAACAGCUGCAC | 505 |
| 3207 | GACCUGCUUCUUGUGGUGC | 179 | 3207 | GACCUGCUUCUUGUGGUGC | 179 | 3225 | GCACCACAAGAAGCAGGUC | 506 |
| 3225 | CGCACCAGCCUGUGGCGGC | 180 | 3225 | CGCACCAGCCUGUGGCGGC | 180 | 3243 | GCCGCCACAGGCUGGUGCG | 507 |
| 3243 | CAGCAGCAGCCCCCGGCCC | 181 | 3243 | CAGCAGCAGCCCCCGGCCC | 181 | 3261 | GGGCCGGGGGCUGCUGCUG | 508 |
| 3261 | CCGGCCCCAGCAGCCCAGG | 182 | 3261 | CCGGCCCCAGCAGCCCAGG | 182 | 3279 | CCUGGGCUGCUGGGGCCGG | 509 |
| 3279 | GGCACCAGCAGCAGGCCCC | 183 | 3279 | GGCACCAGCAGCAGGCCCC | 183 | 3297 | GGGGCCUGCUGCUGGUGCC | 510 |
| 3297 | CAGGCUUCCGCCCUUGAGC | 184 | 3297 | CAGGCUUCCGCCCUUGAGC | 184 | 3315 | GCUCAAGGGCGGAAGCCUG | 511 |
| 3315 | CUGCGUGGCUUCCAACGGG | 185 | 3315 | CUGCGUGGCUUCCAACGGG | 185 | 3333 | CCCGUUGGAAGCCACGCAG | 512 |
| 3333 | GACCUGAGCAGCCUGAGGC | 186 | 3333 | GACCUGAGCAGCCUGAGGC | 186 | 3351 | GCCUCAGGCUGCUCAGGUC | 513 |
| 3351 | CGGCUGGCACAGAGCUUCC | 187 | 3351 | CGGCUGGCACAGAGCUUCC | 187 | 3369 | GGAAGCUCUGUGCCAGCCG | 514 |
| 3369 | CGGCCCGCCAUGCGGAGGG | 188 | 3369 | CGGCCCGCCAUGCGGAGGG | 188 | 3387 | CCCUCCGCAUGGCGGGCCG | 515 |
| 3387 | GUGUUCCUACAUGAGGCCA | 189 | 3387 | GUGUUCCUACAUGAGGCCA | 189 | 3405 | UGGCCUCAUGUAGGAACAC | 516 |
| 3405 | ACGGCCCGGCUGAUGGCGG | 190 | 3405 | ACGGCCCGGCUGAUGGCGG | 190 | 3423 | CCGCCAUCAGCCGGGCCGU | 517 |
| 3423 | GGGGCCAGCCCCACACGGA | 191 | 3423 | GGGGCCAGCCCCACACGGA | 191 | 3441 | UCCGUGUGGGGCUGGCCCC | 518 |
| 3441 | ACACACCAGCUCCUCGACC | 192 | 3441 | ACACACCAGCUCCUCGACC | 192 | 3459 | GGUCGAGGAGCUGGUGUGU | 519 |
| 3459 | CGCAGUCUGAGGCGGCGGG | 193 | 3459 | CGCAGUCUGAGGCGGCGGG | 193 | 3477 | CCCGCCGCCUCAGACUGCG | 520 |
| 3477 | GCAGGCCCCGGUGGCAAAG | 194 | 3477 | GCAGGCCCCGGUGGCAAAG | 194 | 3495 | CUUUGCCACCGGGGCCUGC | 521 |
| 3495 | GGAGGCGCGGUGGCGGAGC | 195 | 3495 | GGAGGCGCGGUGGCGGAGC | 195 | 3513 | GCUCCGCCACCGCGCCUCC | 522 |
| 3513 | CUGGAGCCGCGGCCCACGC | 196 | 3513 | CUGGAGCCGCGGCCCACGC | 196 | 3531 | GCGUGGGCCGCGGCUCCAG | 523 |
| 3531 | CGGCGGGAGCACGCGGAGG | 197 | 3531 | CGGCGGGAGCACGCGGAGG | 197 | 3549 | CCUCCGCGUGCUCCCGCCG | 524 |
| 3549 | GCCUUGCUGCUGGCCUCCU | 198 | 3549 | GCCUUGCUGCUGGCCUCCU | 198 | 3567 | AGGAGGCCAGCAGCAAGGC | 525 |
| 3567 | UGCUACCUGCCCCCCGGCU | 199 | 3567 | UGCUACCUGCCCCCCGGCU | 199 | 3585 | AGCCGGGGGGCAGGUAGCA | 526 |
| 3585 | UUCCUGUCGGCGCCCGGGC | 200 | 3585 | UUCCUGUCGGCGCCCGGGC | 200 | 3603 | GCCCGGGCGCCGACAGGAA | 527 |
| 3603 | CAGCGCGUGGGCAUGCUGG | 201 | 3603 | CAGCGCGUGGGCAUGCUGG | 201 | 3621 | CCAGCAUGCCCACGCGCUG | 528 |
| 3621 | GCUGAGGCGGCGCGCACAC | 202 | 3621 | GCUGAGGCGGCGCGCACAC | 202 | 3639 | GUGUGCGCGCCGCCUCAGC | 529 |
| 3639 | CUCGAGAAGCUUGGCGAUC | 203 | 3639 | CUCGAGAAGCUUGGCGAUC | 203 | 3657 | GAUCGCCAAGCUUCUCGAG | 530 |
| 3657 | CGCCGGCUGCUGCACGACU | 204 | 3657 | CGCCGGCUGCUGCACGACU | 204 | 3675 | AGUCGUGCAGCAGCCGGCG | 531 |
| 3675 | UGUCAGCAGAUGCUCAUGC | 205 | 3675 | UGUCAGCAGAUGCUCAUGC | 205 | 3693 | GCAUGAGCAUCUGCUGACA | 532 |
| 3693 | CGCCUGGGCGGUGGGACCA | 206 | 3693 | CGCCUGGGCGGUGGGACCA | 206 | 3711 | UGGUCCCACCGCCCAGGCG | 533 |
| 3711 | ACUGUCACUUCCAGCUAGA | 207 | 3711 | ACUGUCACUUCCAGCUAGA | 207 | 3729 | UCUAGCUGGAAGUGACAGU | 534 |
| 3729 | ACCCCGUGUCCCCGGCCUC | 208 | 3729 | ACCCCGUGUCCCCGGCCUC | 208 | 3747 | GAGGCCGGGGACACGGGGU | 535 |
| 3747 | CAGCACCCCUGUCUCUAGC | 209 | 3747 | CAGCACCCCUGUCUCUAGC | 209 | 3765 | GCUAGAGACAGGGGUGCUG | 536 |
| 3765 | CCACUUUGGUCCCGUGCAG | 210 | 3765 | CCACUUUGGUCCCGUGCAG | 210 | 3783 | CUGCACGGGACCAAAGUGG | 537 |
| 3783 | GCUUCUGUCCUGCGUCGAA | 211 | 3783 | GCUUCUGUCCUGCGUCGAA | 211 | 3801 | UUCGACGCAGGACAGAAGC | 538 |
| 3801 | AGCUUUGAAGGCCGAAGGC | 212 | 3801 | AGCUUUGAAGGCCGAAGGC | 212 | 3819 | GCCUUCGGCCUUCAAAGCU | 539 |
| 3819 | CAGUGCAAGAGACUCUGGC | 213 | 3819 | CAGUGCAAGAGACUCUGGC | 213 | 3837 | GCCAGAGUCUCUUGCACUG | 540 |
| 3837 | CCUCCACAGUUCGACCUGC | 214 | 3837 | CCUCCACAGUUCGACCUGC | 214 | 3855 | GCAGGUCGAACUGUGGAGG | 541 |
| 3855 | CGGCUGCUGUGUGCCUUCG | 215 | 3855 | CGGCUGCUGUGUGCCUUCG | 215 | 3873 | CGAAGGCACACAGCAGCCG | 542 |
| 3873 | GCGGUGGAAGGCCCGAGGG | 216 | 3873 | GCGGUGGAAGGCCCGAGGG | 216 | 3891 | CCCUCGGGCCUUCCACCGC | 543 |
| 3891 | GGCGCGAUCUUGACCCUAA | 217 | 3891 | GGCGCGAUCUUGACCCUAA | 217 | 3909 | UUAGGGUCAAGAUCGCGCC | 544 |
| 3909 | AGACCGGCGGCCAUGAUGG | 218 | 3909 | AGACCGGCGGCCAUGAUGG | 218 | 3927 | CCAUCAUGGCCGCCGGUCU | 545 |
| 3927 | GUGCUGACCUCUGGUGGCC | 219 | 3927 | GUGCUGACCUCUGGUGGCC | 219 | 3945 | GGCCACCAGAGGUCAGCAC | 546 |
| 3945 | CGAUCGGGGCACUGCAGGG | 220 | 3945 | CGAUCGGGGCACUGCAGGG | 220 | 3963 | CCCUGCAGUGCCCCGAUCG | 547 |
| 3963 | GGCCGAGCCAUUUUGGGGG | 221 | 3963 | GGCCGAGCCAUUUUGGGGG | 221 | 3981 | CCCCCAAAAUGGCUCGGCC | 548 |
| 3981 | GGCCCCCCUCCUUGCUCUG | 222 | 3981 | GGCCCCCCUCCUUGCUCUG | 222 | 3999 | CAGAGCAAGGAGGGGGGCC | 549 |
| 3999 | GCAGGCACCUUAGUGGCUU | 223 | 3999 | GCAGGCACCUUAGUGGCUU | 223 | 4017 | AAGCCACUAAGGUGCCUGC | 550 |
| 4017 | UUUUUCCUCCUGUGUACAG | 224 | 4017 | UUUUUCCUCCUGUGUACAG | 224 | 4035 | CUGUACACAGGAGGAAAAA | 551 |
| 4035 | GGGAAGAGAGGGGUACAUU | 225 | 4035 | GGGAAGAGAGGGGUACAUU | 225 | 4053 | AAUGUACCCCUCUCUUCCC | 552 |
| 4053 | UUCCCUGUGCUGACGGAAG | 226 | 4053 | UUCCCUGUGCUGACGGAAG | 226 | 4071 | CUUCCGUCAGCACAGGGAA | 553 |
| 4071 | GCCAACUUGGCUUUCCCGG | 227 | 4071 | GCCAACUUGGCUUUCCCGG | 227 | 4089 | CCGGGAAAGCCAAGUUGGC | 554 |
| 4089 | GACUGCAAGCAGGGCUCUG | 228 | 4089 | GACUGCAAGCAGGGCUCUG | 228 | 4107 | CAGAGCCCUGCUUGCAGUC | 555 |
| 4107 | GCCCCAGAGGCCUCUCUCU | 229 | 4107 | GCCCCAGAGGCCUCUCUCU | 229 | 4125 | AGAGAGAGGCCUCUGGGGC | 556 |
| 4125 | UCCGUCGUGGGAGAGAGAC | 230 | 4125 | UCCGUCGUGGGAGAGAGAC | 230 | 4143 | GUCUCUCUCCCACGACGGA | 557 |
| 4143 | CGUGUACAUAGUGUAGGUC | 231 | 4143 | CGUGUACAUAGUGUAGGUC | 231 | 4161 | GACCUACACUAUGUACACG | 558 |
| 4161 | CAGCGUGCUUAGCCUCCUG | 232 | 4161 | CAGCGUGCUUAGCCUCCUG | 232 | 4179 | CAGGAGGCUAAGCACGCUG | 559 |
| 4179 | GACCUGAGGCUCCUGUGCU | 233 | 4179 | GACCUGAGGCUCCUGUGCU | 233 | 4197 | AGCACAGGAGCCUCAGGUC | 560 |
| 4197 | UACUUUGCCUUUUGCAAAC | 234 | 4197 | UACUUUGCCUUUUGCAAAC | 234 | 4215 | GUUUGCAAAAGGCAAAGUA | 561 |
| 4215 | CUUUAUUUUCAUAGAUUGA | 235 | 4215 | CUUUAUUUUCAUAGAUUGA | 235 | 4233 | UCAAUCUAUGAAAAUAAAG | 562 |
| 4233 | AGAAGUUUUGUACAGAGAA | 236 | 4233 | AGAAGUUUUGUACAGAGAA | 236 | 4251 | UUCUCUGUACAAAACUUCU | 563 |
| 4251 | AUUAAAAAUGAAAUUAUUU | 237 | 4251 | AUUAAAAAUGAAAUUAUUU | 237 | 4269 | AAAUAAUUUCAUUUUUAAU | 564 |
| 1372 | UGCGCAAGGCCAUCGACUA | 238 | 1372 | UGCGCAAGGCCAUCGACUA | 238 | 1390 | UAGUCGAUGGCCUUGCGCA | 565 |
| 2898 | GUGGCCAAGUGGUGGGCCU | 239 | 2898 | GUGGCCAAGUGGUGGGCCU | 239 | 2916 | AGGCCCACCACUUGGCCAC | 566 |
| 1347 | GCAAAGCUGAAUAAAUCUG | 240 | 1347 | GCAAAGCUGAAUAAAUCUG | 240 | 1365 | CAGAUUUAUUCAGCUUUGC | 567 |
| 1355 | GAAUAAAUCUGCUGUCUUG | 241 | 1355 | GAAUAAAUCUGCUGUCUUG | 241 | 1373 | CAAGACAGCAGAUUUAUUC | 568 |
| 1373 | GCGCAAGGCCAUCGACUAC | 242 | 1373 | GCGCAAGGCCAUCGACUAC | 242 | 1391 | GUAGUCGAUGGCCUUGCGC | 569 |
| 1738 | GCUCCCGCCUGGCCCUGUG | 243 | 1738 | GCUCCCGCCUGGCCCUGUG | 243 | 1756 | CACAGGGCCAGGCGGGAGC | 570 |
| 2205 | GUGGGCCGCUGGCUGGCAG | 244 | 2205 | GUGGGCCGCUGGCUGGCAG | 244 | 2223 | CUGCCAGCCAGCGGCCCAC | 571 |
| 3112 | CCAUCUGUGAGAAGGCCAG | 245 | 3112 | CCAUCUGUGAGAAGGCCAG | 245 | 3130 | CUGGCCUUCUCACAGAUGG | 572 |
| 394 | ACAACCAAGACAGUGACUU | 246 | 394 | ACAACCAAGACAGUGACUU | 246 | 412 | AAGUCACUGUCUUGGUUGU | 573 |
| 1252 | AGAAGCGCACAGCCCACAA | 247 | 1252 | AGAAGCGCACAGCCCACAA | 247 | 1270 | UUGUGGGCUGUGCGCUUCU | 574 |
| 393 | AACAACCAAGACAGUGACU | 248 | 393 | AACAACCAAGACAGUGACU | 248 | 411 | AGUCACUGUCUUGGUUGUU | 575 |
| 1349 | AAAGCUGAAUAAAUCUGCU | 249 | 1349 | AAAGCUGAAUAAAUCUGCU | 249 | 1367 | AGCAGAUUUAUUCAGCUUU | 576 |
| 1354 | UGAAUAAAUCUGCUGUCUU | 250 | 1354 | UGAAUAAAUCUGCUGUCUU | 250 | 1372 | AAGACAGCAGAUUUAUUCA | 577 |
| 1365 | GCUGUCUUGCGCAAGGCCA | 251 | 1365 | GCUGUCUUGCGCAAGGCCA | 251 | 1383 | UGGCCUUGCGCAAGACAGC | 578 |
| 2560 | CCAUGCAGUGGCUCUGCCA | 252 | 2560 | CCAUGCAGUGGCUCUGCCA | 252 | 2578 | UGGCAGAGCCACUGCAUGG | 579 |
| 3714 | GUCACUUCCAGCUAGACCC | 253 | 3714 | GUCACUUCCAGCUAGACCC | 253 | 3732 | GGGUCUAGCUGGAAGUGAC | 580 |
| 3118 | GUGAGAAGGCCAGUGGGUA | 254 | 3118 | GUGAGAAGGCCAGUGGGUA | 254 | 3136 | UACCCACUGGCCUUCUCAC | 581 |
| 3122 | GAAGGCCAGUGGGUACCUG | 255 | 3122 | GAAGGCCAGUGGGUACCUG | 255 | 3140 | CAGGUACCCACUGGCCUUC | 582 |
| 392 | CAACAACCAAGACAGUGAC | 256 | 392 | CAACAACCAAGACAGUGAC | 256 | 410 | GUCACUGUCUUGGUUGUUG | 583 |
| 1370 | CUUGCGCAAGGCCAUCGAC | 257 | 1370 | CUUGCGCAAGGCCAUCGAC | 257 | 1388 | GUCGAUGGCCUUGCGCAAG | 584 |
| 2299 | UCUACCAUAAGCUGCACCA | 258 | 2299 | UCUACCAUAAGCUGCACCA | 258 | 2317 | UGGUGCAGCUUAUGGUAGA | 585 |
| 2302 | ACCAUAAGCUGCACCAGCU | 259 | 2302 | ACCAUAAGCUGCACCAGCU | 259 | 2320 | AGCUGGUGCAGCUUAUGGU | 586 |
| 2305 | AUAAGCUGCACCAGCUGCA | 260 | 2305 | AUAAGCUGCACCAGCUGCA | 260 | 2323 | UGCAGCUGGUGCAGCUUAU | 587 |
| 3046 | ACUCCUUCAAGGCUGCCCG | 261 | 3046 | ACUCCUUCAAGGCUGCCCG | 261 | 3064 | CGGGCAGCCUUGAAGGAGU | 588 |
| 1251 | GAGAAGCGCACAGCCCACA | 262 | 1251 | GAGAAGCGCACAGCCCACA | 262 | 1269 | UGUGGGCUGUGCGCUUCUC | 589 |
| 1272 | GCCAUUGAGAAGCGCUACC | 263 | 1272 | GCCAUUGAGAAGCGCUACC | 263 | 1290 | GGUAGCGCUUCUCAAUGGC | 590 |
| 1360 | AAUCUGCUGUCUUGCGCAA | 264 | 1360 | AAUCUGCUGUCUUGCGCAA | 264 | 1378 | UUGCGCAAGACAGCAGAUU | 591 |
| 1363 | CUGCUGUCUUGCGCAAGGC | 265 | 1363 | CUGCUGUCUUGCGCAAGGC | 265 | 1381 | GCCUUGCGCAAGACAGCAG | 592 |
| 1737 | CGCUCCCGCCUGGCCCUGU | 266 | 1737 | CGCUCCCGCCUGGCCCUGU | 266 | 1755 | ACAGGGCCAGGCGGGAGCG | 593 |
| 1348 | CAAAGCUGAAUAAAUCUGC | 267 | 1348 | CAAAGCUGAAUAAAUCUGC | 267 | 1366 | GCAGAUUUAUUCAGCUUUG | 594 |
| 1362 | UCUGCUGUCUUGCGCAAGG | 268 | 1362 | UCUGCUGUCUUGCGCAAGG | 268 | 1380 | CCUUGCGCAAGACAGCAGA | 595 |
| 1729 | UGCUGGACCGCUCCCGCCU | 269 | 1729 | UGCUGGACCGCUCCCGCCU | 269 | 1747 | AGGCGGGAGCGGUCCAGCA | 596 |
| 1735 | ACCGCUCCCGCCUGGCCCU | 270 | 1735 | ACCGCUCCCGCCUGGCCCU | 270 | 1753 | AGGGCCAGGCGGGAGCGGU | 597 |
| 2300 | CUACCAUAAGCUGCACCAG | 271 | 2300 | CUACCAUAAGCUGCACCAG | 271 | 2318 | CUGGUGCAGCUUAUGGUAG | 598 |
| 3121 | AGAAGGCCAGUGGGUACCU | 272 | 3121 | AGAAGGCCAGUGGGUACCU | 272 | 3139 | AGGUACCCACUGGCCUUCU | 599 |
| 1726 | GCAUGCUGGACCGCUCCCG | 273 | 1726 | GCAUGCUGGACCGCUCCCG | 273 | 1744 | CGGGAGCGGUCCAGCAUGC | 600 |
| 2204 | GGUGGGCCGCUGGCUGGCA | 274 | 2204 | GGUGGGCCGCUGGCUGGCA | 274 | 2222 | UGCCAGCCAGCGGCCCACC | 601 |
| 1012 | ACUUCAUCAAGGCAGACUC | 275 | 1012 | ACUUCAUCAAGGCAGACUC | 275 | 1030 | GAGUCUGCCUUGAUGAAGU | 602 |
| 1727 | CAUGCUGGACCGCUCCCGC | 276 | 1727 | CAUGCUGGACCGCUCCCGC | 276 | 1745 | GCGGGAGCGGUCCAGCAUG | 603 |
| 3047 | CUCCUUCAAGGCUGCCCGG | 277 | 3047 | CUCCUUCAAGGCUGCCCGG | 277 | 3065 | CCGGGCAGCCUUGAAGGAG | 604 |
| 3116 | CUGUGAGAAGGCCAGUGGG | 278 | 3116 | CUGUGAGAAGGCCAGUGGG | 278 | 3134 | CCCACUGGCCUUCUCACAG | 605 |
| 1730 | GCUGGACCGCUCCCGCCUG | 279 | 1730 | GCUGGACCGCUCCCGCCUG | 279 | 1748 | CAGGCGGGAGCGGUCCAGC | 606 |
| 2561 | CAUGCAGUGGCUCUGCCAC | 280 | 2561 | CAUGCAGUGGCUCUGCCAC | 280 | 2579 | GUGGCAGAGCCACUGCAUG | 607 |
| 2563 | UGCAGUGGCUCUGCCACCC | 281 | 2563 | UGCAGUGGCUCUGCCACCC | 281 | 2581 | GGGUGGCAGAGCCACUGCA | 608 |
| 1273 | CCAUUGAGAAGCGCUACCG | 282 | 1273 | CCAUUGAGAAGCGCUACCG | 282 | 1291 | CGGUAGCGCUUCUCAAUGG | 609 |
| 1350 | AAGCUGAAUAAAUCUGCUG | 283 | 1350 | AAGCUGAAUAAAUCUGCUG | 283 | 1368 | CAGCAGAUUUAUUCAGCUU | 610 |
| 1733 | GGACCGCUCCCGCCUGGCC | 284 | 1733 | GGACCGCUCCCGCCUGGCC | 284 | 1751 | GGCCAGGCGGGAGCGGUCC | 611 |
| 1734 | GACCGCUCCCGCCUGGCCC | 285 | 1734 | GACCGCUCCCGCCUGGCCC | 285 | 1752 | GGGCCAGGCGGGAGCGGUC | 612 |
| 2298 | GUCUACCAUAAGCUGCACC | 286 | 2298 | GUCUACCAUAAGCUGCACC | 286 | 2316 | GGUGCAGCUUAUGGUAGAC | 613 |
| 3113 | CAUCUGUGAGAAGGCCAGU | 287 | 3113 | CAUCUGUGAGAAGGCCAGU | 287 | 3131 | ACUGGCCUUCUCACAGAUG | 614 |
| 1736 | CCGCUCCCGCCUGGCCCUG | 288 | 1736 | CCGCUCCCGCCUGGCCCUG | 288 | 1754 | CAGGGCCAGGCGGGAGCGG | 615 |
| 3115 | UCUGUGAGAAGGCCAGUGG | 289 | 3115 | UCUGUGAGAAGGCCAGUGG | 289 | 3133 | CCACUGGCCUUCUCACAGA | 616 |
| 3355 | UGGCACAGAGCUUCCGGCC | 290 | 3355 | UGGCACAGAGCUUCCGGCC | 290 | 3373 | GGCCGGAAGCUCUGUGCCA | 617 |
| 1368 | GUCUUGCGCAAGGCCAUCG | 291 | 1368 | GUCUUGCGCAAGGCCAUCG | 291 | 1386 | CGAUGGCCUUGCGCAAGAC | 618 |
| 1725 | GGCAUGCUGGACCGCUCCC | 292 | 1725 | GGCAUGCUGGACCGCUCCC | 292 | 1743 | GGGAGCGGUCCAGCAUGCC | 619 |
| 2203 | GGGUGGGCCGCUGGCUGGC | 293 | 2203 | GGGUGGGCCGCUGGCUGGC | 293 | 2221 | GCCAGCCAGCGGCCCACCC | 620 |
| 2899 | UGGCCAAGUGGUGGGCCUC | 294 | 2899 | UGGCCAAGUGGUGGGCCUC | 294 | 2917 | GAGGCCCACCACUUGGCCA | 621 |
| 3049 | CCUUCAAGGCUGCCCGGGC | 295 | 3049 | CCUUCAAGGCUGCCCGGGC | 295 | 3067 | GCCCGGGCAGCCUUGAAGG | 622 |
| 3120 | GAGAAGGCCAGUGGGUACC | 296 | 3120 | GAGAAGGCCAGUGGGUACC | 296 | 3138 | GGUACCCACUGGCCUUCUC | 623 |
| 1358 | UAAAUCUGCUGUCUUGCGC | 297 | 1358 | UAAAUCUGCUGUCUUGCGC | 297 | 1376 | GCGCAAGACAGCAGAUUUA | 624 |
| 1359 | AAAUCUGCUGUCUUGCGCA | 298 | 1359 | AAAUCUGCUGUCUUGCGCA | 298 | 1377 | UGCGCAAGACAGCAGAUUU | 625 |
| 1364 | UGCUGUCUUGCGCAAGGCC | 299 | 1364 | UGCUGUCUUGCGCAAGGCC | 299 | 1382 | GGCCUUGCGCAAGACAGCA | 626 |
| 2202 | UGGGUGGGCCGCUGGCUGG | 300 | 2202 | UGGGUGGGCCGCUGGCUGG | 300 | 2220 | CCAGCCAGCGGCCCACCCA | 627 |
| 2206 | UGGGCCGCUGGCUGGCAGG | 301 | 2206 | UGGGCCGCUGGCUGGCAGG | 301 | 2224 | CCUGCCAGCCAGCGGCCCA | 628 |
| 2303 | CCAUAAGCUGCACCAGCUG | 302 | 2303 | CCAUAAGCUGCACCAGCUG | 302 | 2321 | CAGCUGGUGCAGCUUAUGG | 629 |
| 2558 | UGCCAUGCAGUGGCUCUGC | 303 | 2558 | UGCCAUGCAGUGGCUCUGC | 303 | 2576 | GCAGAGCCACUGCAUGGCA | 630 |
| 3123 | AAGGCCAGUGGGUACCUGC | 304 | 3123 | AAGGCCAGUGGGUACCUGC | 304 | 3141 | GCAGGUACCCACUGGCCUU | 631 |
| 2207 | GGGCCGCUGGCUGGCAGGC | 305 | 2207 | GGGCCGCUGGCUGGCAGGC | 305 | 2225 | GCCUGCCAGCCAGCGGCCC | 632 |
| 2208 | GGCCGCUGGCUGGCAGGCC | 306 | 2208 | GGCCGCUGGCUGGCAGGCC | 306 | 2226 | GGCCUGCCAGCCAGCGGCC | 633 |
| 3114 | AUCUGUGAGAAGGCCAGUG | 307 | 3114 | AUCUGUGAGAAGGCCAGUG | 307 | 3132 | CACUGGCCUUCUCACAGAU | 634 |
| 396 | AACCAAGACAGUGACUUCC | 308 | 396 | AACCAAGACAGUGACUUCC | 308 | 414 | GGAAGUCACUGUCUUGGUU | 635 |
| 1732 | UGGACCGCUCCCGCCUGGC | 309 | 1732 | UGGACCGCUCCCGCCUGGC | 309 | 1750 | GCCAGGCGGGAGCGGUCCA | 636 |
| 397 | ACCAAGACAGUGACUUCCC | 310 | 397 | ACCAAGACAGUGACUUCCC | 310 | 415 | GGGAAGUCACUGUCUUGGU | 637 |
| 3119 | UGAGAAGGCCAGUGGGUAC | 311 | 3119 | UGAGAAGGCCAGUGGGUAC | 311 | 3137 | GUACCCACUGGCCUUCUCA | 638 |
| 390 | AUCAACAACCAAGACAGUG | 312 | 390 | AUCAACAACCAAGACAGUG | 312 | 408 | CACUGUCUUGGUUGUUGAU | 639 |
| 1361 | AUCUGCUGUCUUGCGCAAG | 313 | 1361 | AUCUGCUGUCUUGCGCAAG | 313 | 1379 | CUUGCGCAAGACAGCAGAU | 640 |
| 2304 | CAUAAGCUGCACCAGCUGC | 314 | 2304 | CAUAAGCUGCACCAGCUGC | 314 | 2322 | GCAGCUGGUGCAGCUUAUG | 641 |
| 1728 | AUGCUGGACCGCUCCCGCC | 315 | 1728 | AUGCUGGACCGCUCCCGCC | 315 | 1746 | GGCGGGAGCGGUCCAGCAU | 642 |
| 1367 | UGUCUUGCGCAAGGCCAUC | 316 | 1367 | UGUCUUGCGCAAGGCCAUC | 316 | 1385 | GAUGGCCUUGCGCAAGACA | 643 |
| 1356 | AAUAAAUCUGCUGUCUUGC | 317 | 1356 | AAUAAAUCUGCUGUCUUGC | 317 | 1374 | GCAAGACAGCAGAUUUAUU | 644 |
| 1357 | AUAAAUCUGCUGUCUUGCG | 318 | 1357 | AUAAAUCUGCUGUCUUGCG | 318 | 1375 | CGCAAGACAGCAGAUUUAU | 645 |
| 2301 | UACCAUAAGCUGCACCAGC | 319 | 2301 | UACCAUAAGCUGCACCAGC | 319 | 2319 | GCUGGUGCAGCUUAUGGUA | 646 |
| 2562 | AUGCAGUGGCUCUGCCACC | 320 | 2562 | AUGCAGUGGCUCUGCCACC | 320 | 2580 | GGUGGCAGAGCCACUGCAU | 647 |
| 3048 | UCCUUCAAGGCUGCCCGGG | 321 | 3048 | UCCUUCAAGGCUGCCCGGG | 321 | 3066 | CCCGGGCAGCCUUGAAGGA | 648 |
| 2122 | GCCGGCCCCUGCCCACCUC | 322 | 2122 | GCCGGCCCCUGCCCACCUC | 322 | 2140 | GAGGUGGGCAGGGGCCGGC | 649 |
| 2121 | GGCCGGCCCCUGCCCACCU | 323 | 2121 | GGCCGGCCCCUGCCCACCU | 323 | 2139 | AGGUGGGCAGGGGCCGGCC | 650 |
| 2118 | CUGGGCCGGCCCCUGCCCA | 324 | 2118 | CUGGGCCGGCCCCUGCCCA | 324 | 2136 | UGGGCAGGGGCCGGCCCAG | 651 |
| 2119 | UGGGCCGGCCCCUGCCCAC | 325 | 2119 | UGGGCCGGCCCCUGCCCAC | 325 | 2137 | GUGGGCAGGGGCCGGCCCA | 652 |
| 2120 | GGGCCGGCCCCUGCCCACC | 326 | 2120 | GGGCCGGCCCCUGCCCACC | 326 | 2138 | GGUGGGCAGGGGCCGGCCC | 653 |
| 3715 | UCACUUCCAGCUAGACCCC | 327 | 3715 | UCACUUCCAGCUAGACCCC | 327 | 3733 | GGGGUCUAGCUGGAAGUGA | 654 |

The 3′-ends of the Upper sequence and the Lower sequence of the siNA construct can include an overhang sequence, for example about 1, 2, 3, or 4 nucleotides in length, preferably 2 nucleotides in length, wherein the overhanging sequence of the lower sequence is optionally complementary to a portion of the target sequence. The upper sequence is also referred to as the sense strand, whereas the lower sequence is also referred to as the antisense strand. The upper and lower sequences in the Table can further comprise a chemical modification having Formulae I-VII, such as exemplary siNA constructs shown in FiGS. 4 and 5, or having modifications described in Table IV or any combination thereof.

TABLE III

SREBP1 Synthetic Modified siNA constructs

| Tar- | | | | | | |
|---|---|---|---|---|---|---|
| get | | Seq | Cmpd | | | Seq |
| Pos | Target | ID | # | Aliases | Sequence | ID |
| 1375 | GCGCAAGGCCAUCGACUACAUUC | 655 | | SREBP1: 1375U21 siRNA | GCAAGGCCAUCGACUACAUTT | 663 |
| 1374 | UGCGCAAGGCCAUCGACUACAUU | 656 | SREBP1: 1374U21 siRNA | CGCAAGGCCAUCGACUACATT | 664 | |
| 391 | UAUCAACAACCAAGACAGUGACU | 657 | SREBP1: 391U21 siRNA | UCAACAACCAAGACAGUGATT | 665 | |
| 395 | AACAACCAAGACAGUGACUUCCC | 658 | SREBP1: 395U21 siRNA | CAACCAAGACAGUGACUUCTT | 666 | |
| 1351 | AAAGCUGAAUAAAUCUGCUGUCU | 659 | SREBP1: 1351U21 siRNA | AGCUGAAUAAAUCUGCUGUTT | 667 | |
| 1352 | AAGCUGAAUAAAUCUGCUGUCUU | 660 | SREBP1: 1352U21 siRNA | GCUGAAUAAAUCUGCUGUCTT | 668 | |
| 1366 | UGCUGUCUUGCGCAAGGCCAUCG | 661 | SREBP1: 1366U21 siRNA | CUGUCUUGCGCAAGGCCAUTT | 669 | |
| 1369 | UGUCUUGCGCAAGGCCAUCGACU | 662 | SREBP1: 1369U21 siRNA | UCUUGCGCAAGGCCAUCGATT | 670 | |
| 1375 | GCGCAAGGCCAUCGACUACAUUC | 655 | SREBP1: 1393L21 siRNA (1375C) | AUGUAGUCGAUGGCCUUGCTT | 671 | |
| 1374 | UGCGCAAGGCCAUCGACUACAUU | 656 | SREBP1: 1392L21 siRNA (1374C) | UGUAGUCGAUGGCCUUGCGTT | 672 | |
| 391 | UAUCAACAACCAAGACAGUGACU | 657 | SREBP1: 409L21 siRNA (391C) | UCACUGUCUUGGUUGUUGATT | 673 | |
| 395 | AACAACCAAGACAGUGACUUCCC | 658 | SREBP1: 413L21 siRNA (395C) | GAAGUCACUGUCUUGGUUGTT | 674 | |
| 1351 | AAAGCUGAAUAAAUCUGCUGUCU | 659 | SREBP1: 1369L21 siRNA (1351C) | ACAGCAGAUUUAUUCAGCUTT | 675 | |
| 1352 | AAGCUGAAUAAAUCUGCUGUCUU | 660 | SREBP1: 1370L21 siRNA (1352C) | GACAGCAGAUUUAUUCAGCTT | 676 | |
| 1366 | UGCUGUCUUGCGCAAGGCCAUCG | 661 | SREBP1: 1384L21 siRNA (1366C) | AUGGCCUUGCGCAAGACAGTT | 677 | |
| 1369 | UGUCUUGCGCAAGGCCAUCGACU | 662 | SREBP1: 1387L21 siRNA (1369C) | UCGAUGGCCUUGCGCAAGATT | 678 | |
| 1375 | GCGCAAGGCCAUCGACUACAUUC | 655 | SREBP1: 1375U21 siRNA stab04 | B GcAAGGccAucGAcuAcAuTT B | 679 | |
| 1374 | UGCGCAAGGCCAUCGACUACAUU | 656 | SREBP1: 1374U21 siRNA stab04 | B cGcAAGGccAucGAcuAcATT B | 680 | |
| 391 | UAUCAACAACCAAGACAGUGACU | 657 | SREBP1: 391U21 siRNA stab04 | B ucAAcAAccAAGAcAGuGATT B | 681 | |
| 395 | AACAACCAAGACAGUGACUUCCC | 658 | SREBP1: 395U21 siRNA stab04 | B cAAccAAGAcAGuGAcuucTT B | 682 | |
| 1351 | AAAGCUGAAUAAAUCUGCUGUCU | 659 | SREBP1: 1351U21 siRNA stab04 | B AGcuGAAuAAAucuGcuGuTT B | 683 | |
| 1352 | AAGCUGAAUAAAUCUGCUGUCUU | 660 | SREBP1: 1352U21 siRNA stab04 | B GcuGAAuAAAucuGcuGucTT B | 684 | |
| 1366 | UGCUGUCUUGCGCAAGGCCAUCG | 661 | SREBP1: 1366U21 siRNA stab04 | B cuGucuuGcGcAAGGccAuTT B | 685 | |
| 1369 | UGUCUUGCGCAAGGCCAUCGACU | 662 | SREBP1: 1369U21 siRNA stab04 | B ucuuGcGcAAGGccAucGATT B | 686 | |
| 1375 | GCGCAAGGCCAUCGACUACAUUC | 655 | SREBP1: 1393L21 siRNA (1375C) stab05 | AuGuAGucGAuGGccuuGcTsT | 687 | |
| 1374 | UGCGCAAGGCCAUCGACUACAUU | 656 | SREBP1: 1392L21 siRNA (1374C) stab05 | uGuAGucGAuGGccuuGcGTsT | 688 | |
| 391 | UAUCAACAACCAAGACAGUGACU | 657 | SREBP1: 409L21 siRNA (391C) stab05 | ucAcuGucuuGGuuGuuGATsT | 689 | |
| 395 | AACAACCAAGACAGUGACUUCCC | 658 | SREBP1: 413L21 siRNA (395C) stab05 | GAAGucAcuGucuuGGuuGTsT | 690 | |
| 1351 | AAAGCUGAAUAAAUCUGCUGUCU | 659 | SREBP1: 1369L21 siRNA (1351C) stab05 | AcAGcAGAuuuAuucAGcuTsT | 691 | |
| 1352 | AAGCUGAAUAAAUCUGCUGUCUU | 660 | SREBP1: 1370L21 siRNA (1352C) stab05 | GAcAGcAGAuuuAuucAGcTsT | 692 | |
| 1366 | UGCUGUCUUGCGCAAGGCCAUCG | 661 | SREBP1: 1384L21 siRNA (1366C) stab05 | AuGGccuuGcGcAAGAcAGTsT | 693 | |
| 1369 | UGUCUUGCGCAAGGCCAUCGACU | 662 | SREBP1: 1387L21 siRNA (1369C) stab05 | ucGAuGGccuuGcGcAAGATsT | 694 | |
| 1375 | GCGCAAGGCCAUCGACUACAUUC | 655 | SREBP1: 1375U21 siRNA stab07 | B GcAAGGccAucGAcuAcAuTT B | 695 | |
| 1374 | UGCGCAAGGCCAUCGACUACAUU | 656 | SREBP1: 1374U21 siRNA stab07 | B cGcAAGGccAucGAcuAcATT B | 696 | |
| 391 | UAUCAACAACCAAGACAGUGACU | 657 | SREBP1: 391U21 siRNA stab07 | B ucAAcAAccAAGAcAGuGATT B | 697 | |
| 395 | AACAACCAAGACAGUGACUUCCC | 658 | SREBP1: 395U21 siRNA stab07 | B cAAccAAGAcAGuGAcuucTT B | 698 | |
| 1351 | AAAGCUGAAUAAAUCUGCUGUCU | 659 | SREBP1: 1351U21 siRNA stab07 | B AGcuGAAuAAAucuGcuGuTT B | 699 | |
| 1352 | AAGCUGAAUAAAUCUGCUGUCUU | 660 | SREBP1: 1352U21 siRNA stab07 | B GcuGAAuAAAucuGcuGucTT B | 700 | |
| 1366 | UGCUGUCUUGCGCAAGGCCAUCG | 661 | SREBP1: 1366U21 siRNA stab07 | B cuGucuuGcGcAAGGccAuTT B | 701 | |
| 1369 | UGUCUUGCGCAAGGCCAUCGACU | 662 | SREBP1: 1369U21 siRNA stab07 | B ucuuGcGcAAGGccAucGATT B | 702 | |
| 1375 | GCGCAAGGCCAUCGACUACAUUC | 655 | SREBP1: 1393L21 siRNA (1375C) stab11 | AuGuAGucGAuGGccuuGcTsT | 703 | |
| 1374 | UGCGCAAGGCCAUCGACUACAUU | 656 | SREBP1: 1392L21 siRNA (1374C) stab11 | uGuAGucGAuGGccuuGcGTsT | 704 | |
| 391 | UAUCAACAACCAAGACAGUGACU | 657 | SREBP1: 409L21 siRNA (391C) stab11 | ucAcuGucuuGGuuGuuGATsT | 705 | |
| 395 | AACAACCAAGACAGUGACUUCCC | 658 | SREBP1: 413L21 siRNA (395C) stab11 | GAAGucAcuGucuuGGuuGTsT | 706 | |
| 1351 | AAAGCUGAAUAAAUCUGCUGUCU | 659 | SREBP1: 1369L21 siRNA (1351C) stab11 | AcAGcAGAuuuAuucAGcuTsT | 707 | |
| 1352 | AAGCUGAAUAAAUCUGCUGUCUU | 660 | SREBP1: 1370L21 siRNA (1352C) stab11 | GAcAGcAGAuuuAuucAGcTsT | 708 | |
| 1366 | UGCUGUCUUGCGCAAGGCCAUCG | 661 | SREBP1: 1384L21 siRNA (1366C) stab11 | AuGGccuuGcGcAAGAcAGTsT | 709 | |
| 1369 | UGUCUUGCGCAAGGCCAUCGACU | 662 | SREBP1: 1387L21 siRNA (1369C) stab11 | ucGAuGGccuuGcGcAAGATsT | 710 | |
| 1375 | GCGCAAGGCCAUCGACUACAUUC | 655 | SREBP1: 1375U21 siRNA stab18 | B GcAAGGccAucGAcuAcAuTT B | 711 | |
| 1374 | UGCGCAAGGCCAUCGACUACAUU | 656 | SREBP1: 1374U21 siRNA stab18 | B cGcAAGGccAucGAcuAcATT B | 712 | |
| 391 | UAUCAACAACCAAGACAGUGACU | 657 | SREBP1: 391U21 siRNA stab18 | B ucAAcAAccAAGAcAGuGATT B | 713 | |
| 395 | AACAACCAAGACAGUGACUUCCC | 658 | SREBP1: 395U21 siRNA stab18 | B cAAccAAGAcAGuGAcuucTT B | 714 | |
| 1351 | AAAGCUGAAUAAAUCUGCUGUCU | 659 | SREBP1: 1351U21 siRNAstab18 | B AGcuGAAuAAAucuGcuGuTT B | 715 | |
| 1352 | AAGCUGAAUAAAUCUGCUGUCUU | 660 | SREBP1: 1352U21 siRNAstab18 | B GcuGAAuAAAucuGcuGucTT B | 716 | |
| 1366 | UGCUGUCUUGCGCAAGGCCAUCG | 661 | SREBP1: 1366U21 siRNAstab18 | B cuGucuuGcGcAAGGccAuTT B | 717 | |
| 1369 | UGUCUUGCGCAAGGCCAUCGACU | 662 | SREBP1: 1369U21 siRNA stab18 | B ucuuGcGcAAGGccAucGATT B | 718 | |
| 1375 | GCGCAAGGCCAUCGACUACAUUC | 655 | SREBP1: 1393L21 siRNA (1376C) stab08 | AuGuAGucGAuGGccuuGcTsT | 719 | |
| 1374 | UGCGCAAGGCCAUCGACUACAUU | 656 | SREBP1: 1392L21 siRNA (1374C) stab08 | uGuAGucGAuGGccuuGcGTsT | 720 | |
| 391 | UAUCAACAACCAAGACAGUGACU | 657 | SREBP1: 409L21 siRNA (391C) stab08 | ucAcuGucuuGGuuGuuGATsT | 721 | |
| 395 | AACAACCAAGACAGUGACUUCCC | 658 | SREBP1: 413L21 siRNA (395C) stab08 | GAAGucAcuGucuuGGuuGTsT | 722 | |
| 1351 | AAAGCUGAAUAAAUCUGCUGUCU | 659 | SREBP1: 1369L21 siRNA (1351C) stab08 | AcAGcAGAuuuAuucAGcuTsT | 723 | |
| 1352 | AAGCUGAAUAAAUCUGCUGUCUU | 660 | SREBP1: 1370L21 siRNA (1352C) stab08 | GAcAGcAGAuuuAuucAGcTsT | 724 | |
| 1366 | UGCUGUCUUGCGCAAGGCCAUCG | 661 | SREBP1: 1384L21 siRNA (1366C) stab08 | AuGGccuuGcGcAAGAcAGTsT | 725 | |
| 1369 | UGUCUUGCGCAAGGCCAUCGACU | 662 | SREBP1: 1387L21 siRNA (1369C) stab08 | ucGAuGGccuuGcGcAAGATsT | 726 | |
| 1375 | GCGCAAGGCCAUCGACUACAUUC | 655 | SREBP1: 1375U21 siRNA stab09 | B GCAAGGCCAUCGACUACAUTT B | 727 | |
| 1374 | UGCGCAAGGCCAUCGACUACAUU | 656 | SREBP1: 1374U21 siRNA stab09 | B CGCAAGGCCAUCGACUACATT B | 728 | |
| 391 | UAUCAACAACCAAGACAGUGACU | 657 | SREBP1: 391U21 siRNA stab09 | B UCAACAACCAAGACAGUGATT B | 729 | |
| 395 | AACAACCAAGACAGUGACUUCCC | 658 | SREBP1: 395U21 siRNA stab09 | B CAACCAAGACAGUGACUUCTT B | 730 | |
| 1351 | AAAGCUGAAUAAAUCUGCUGUCU | 659 | SREBP1: 1351U21 siRNA stab09 | B AGCUGAAUAAAUCUGCUGUTT B | 731 | |
| 1352 | AAGCUGAAUAAAUCUGCUGUCUU | 660 | SREBP1: 1352U21 siRNA stab09 | B GCUGAAUAAAUCUGCUGUCTT B | 732 | |
| 1366 | UGCUGUCUUGCGCAAGGCCAUCG | 661 | SREBP1: 1366U21 siRNA stab09 | B CUGUCUUGCGCAAGGCCAUTT B | 733 | |
| 1369 | UGUCUUGCGCAAGGCCAUCGACU | 662 | SREBP1: 1369U21 siRNA stab09 | B UCUUGCGCAAGGCCAUCGATT B | 734 | |
| 1375 | GCGCAAGGCCAUCGACUACAUUC | 655 | SREBP1: 1393L21 siRNA (1375C) stab10 | AUGUAGUCGAUGGCCUUGCTsT | 735 | |
| 1374 | UGCGCAAGGCCAUCGACUACAUU | 656 | SREBP1: 1392L21 siRNA (1374C) stab10 | UGUAGUCGAUGGCCUUGCGTsT | 736 | |
| 391 | UAUCAACAACCAAGACAGUGACU | 657 | SREBP1: 409L21 siRNA (391C) stab10 | UCACUGUCUUGGUUGUUGATsT | 737 | |
| 395 | AACAACCAAGACAGUGACUUCCC | 658 | SREBP1: 413L21 siRNA (395C) stab10 | GAAGUCACUGUCUUGGUUGTsT | 738 | |
| 1351 | AAAGCUGAAUAAAUCUGCUGUCU | 659 | SREBP1: 1369L21 siRNA (1351C) stab10 | ACAGCAGAUUUAUUCAGCUTsT | 739 | |
| 1352 | AAGCUGAAUAAAUCUGCUGUCUU | 660 | SREBP1: 1370L21 siRNA (1352C) stab10 | GACAGCAGAUUUAUUCAGCTsT | 740 | |
| 1366 | UGCUGUCUUGCGCAAGGCCAUCG | 661 | SREBP1: 1384L21 siRNA (1366C) stab10 | AUGGCCUUGCGCAAGACAGTsT | 741 | |
| 1369 | UGUCUUGCGCAAGGCCAUCGACU | 662 | SREBP1: 1387L21 siRNA (1369C) stab10 | UCGAUGGCCUUGCGCAAGATsT | 742 | |
| 1375 | GCGCAAGGCCAUCGACUACAUUC | 655 | SREBP1: 1393L21 siRNA (1375C) stab19 | AuGuAGucGAuGGccuuGcTT B | 743 | |
| 1374 | UGCGCAAGGCCAUCGACUACAUU | 656 | SREBP1: 1392L21 siRNA (1374C) stab19 | uGuAGucGAuGGccuuGcGTT B | 744 | |
| 391 | UAUCAACAACCAAGACAGUGACU | 657 | SREBP1: 409L21 siRNA (391C) stab19 | ucAcuGucuuGGuuGuuGATT B | 745 | |
| 395 | AACAACCAAGACAGUGACUUCCC | 658 | SREBP1: 413L21 siRNA (395C) stab19 | GAAGucAcuGucuuGGuuGTT B | 746 | |
| 1351 | AAAGCUGAAUAAAUCUGCUGUCU | 659 | SREBP1: 1369L21 siRNA (1351C) stab19 | AcAGcAGAuuuAuucAGcuTT B | 747 | |
| 1352 | AAGCUGAAUAAAUCUGCUGUCUU | 660 | SREBP1: 1370L21 siRNA (1352C) stab19 | GAcAGcAGAuuuAuucAGcTT B | 748 | |
| 1366 | UGCUGUCUUGCGCAAGGCCAUCG | 661 | SREBP1: 1384L21 siRNA (1366C) stab19 | AuGGccuuGcGcAAGAcAGTT B | 749 | |
| 1369 | UGUCUUGCGCAAGGCCAUCGACU | 662 | SREBP1: 1387L21 siRNA (1369C) stab19 | ucGAuGGccuuGcGcAAGATT B | 750 | |
| 1375 | GCGCAAGGCCAUCGACUACAUUC | 655 | SREBP1: 1393L21 siRNA (1375C) stab22 | AUGUAGUCGAUGGCCUUGCTT B | 751 | |
| 1374 | UGCGCAAGGCCAUCGACUACAUU | 656 | SREBP1: 1392L21 siRNA (1374C) stab22 | UGUAGUCGAUGGCCUUGCGTT B | 752 | |
| 391 | UAUCAACAACCAAGACAGUGACU | 657 | SREBP1: 409L21 siRNA (391C) stab22 | UCACUGUCUUGGUUGUUGATT B | 753 | |
| 395 | AACAACCAAGACAGUGACUUCCC | 658 | SREBP1: 413L21 siRNA (395C) stab22 | GAAGUCACUGUCUUGGUUGTT B | 754 | |
| 1351 | AAAGCUGAAUAAAUCUGCUGUCU | 659 | SREBP1: 1369L21 siRNA (1351C) stab22 | ACAGCAGAUUUAUUCAGCUTT B | 755 | |
| 1352 | AAGCUGAAUAAAUCUGCUGUCUU | 660 | SREBP1: 1370L21 siRNA (1352C) stab22 | GACAGCAGAUUUAUUCAGCTT B | 756 | |
| 1366 | UGCUGUCUUGCGCAAGGCCAUCG | 661 | SREBP1: 1384L21 siRNA (1366C) stab22 | AUGGCCUUGCGCAAGACAGTT B | 757 | |
| 1369 | UGUCUUGCGCAAGGCCAUCGACU | 662 | SREBP1: 1387L21 siRNA (1369C) stab22 | UCGAUGGCCUUGCGCAAGATT B | 758 | |
| 1375 | GCGCAAGGCCAUCGACUACAUUC | 655 | SREBP1: 1393L21 siRNA (1375C) stab25 | AUGuAGucGAuGGccuuGcTsT | 759 | |
| 1374 | UGCGCAAGGCCAUCGACUACAUU | 656 | SREBP1: 1392L21 siRNA (1374C) stab25 | UGUAGucGAuGGccuuGcGTsT | 760 | |
| 391 | UAUCAACAACCAAGACAGUGACU | 657 | SREBP1: 409L21 siRNA (391C) stab25 | UCAcuGucuuGGuuGuuGATsT | 761 | |
| 395 | AACAACCAAGACAGUGACUUCCC | 658 | SREBP1: 413L21 siRNA (395C) stab25 | GAAGucAcuGucuuGGuuGTsT | 762 | |
| 1351 | AAAGCUGAAUAAAUCUGCUGUCU | 659 | SREBP1: 1369L21 siRNA (1351C) stab25 | ACAGcAGAuuuAuucAGcuTsT | 763 | |
| 1352 | AAGCUGAAUAAAUCUGCUGUCUU | 660 | SREBP1: 1370L21 siRNA (1352C) stab25 | GACAGcAGAuuuAuucAGcTsT | 764 | |
| 1366 | UGCUGUCUUGCGCAAGGCCAUCG | 661 | SREBP1: 1384L21 siRNA (1366C) stab25 | AUGGccuuGcGcAAGAcAGTsT | 765 | |
| 1369 | UGUCUUGCGCAAGGCCAUCGACU | 662 | SREBP1: 1387L21 siRNA (1369C) stab25 | UCGAuGGccuuGcGcAAGATsT | 766 | |

Uppercase = ribonucleotide
u, c = 2′-deoxy-2′-fluoro U, C
T = thymidine
B = inverted deoxy abasic
s = phosphorothioate linkage
A = deoxy Adenosine
G = deoxy Guanosine
G = 2′-O-methyl Guanosine
A = 2′-O-methyl Adenosine

TABLE IV
Non-limiting examples of Stabilization Chemistries for
chemically modified siNA constructs

| Chemistry | pyrimidine | Purine | cap | p = S | Strand |
|---|---|---|---|---|---|
| “Stab 00” | Ribo | Ribo | TT at 3′-ends | | S/AS |
| “Stab 1” | Ribo | Ribo | — | 5 at 5′-end | S/AS |
| | | | | 1 at 3′-end | |
| “Stab 2” | Ribo | Ribo | — | All linkages | Usually AS |
| “Stab 3” | 2′-fluoro | Ribo | — | 4 at 5′-end | Usually S |
| | | | | 4 at 3′-end | |
| “Stab 4” | 2′-fluoro | Ribo | 5′ and 3′-ends | — | Usually S |
| “Stab 5” | 2′-fluoro | Ribo | — | 1 at 3′-end | Usually AS |
| “Stab 6” | 2′-O-Methyl | Ribo | 5′ and 3′-ends | — | Usually S |
| “Stab 7” | 2′-fluoro | 2′-deoxy | 5′ and 3′-ends | — | Usually S |
| “Stab 8” | 2′-fluoro | 2′-O-Methyl | — | 1 at 3′-end | S/AS |
| “Stab 9” | Ribo | Ribo | 5′ and 3′-ends | — | Usually S |
| “Stab 10” | Ribo | Ribo | — | 1 at 3′-end | Usually AS |
| “Stab 11” | 2′-fluoro | 2′-deoxy | — | 1 at 3′-end | Usually AS |
| “Stab 12” | 2′-fluoro | LNA | 5′ and 3′-ends | | Usually S |
| “Stab 13” | 2′-fluoro | LNA | | 1 at 3′-end | Usually AS |
| “Stab 14” | 2′-fluoro | 2′-deoxy | | 2 at 5′-end | Usually AS |
| | | | | 1 at 3′-end | |
| “Stab 15” | 2′-deoxy | 2′-deoxy | | 2 at 5′-end | Usually AS |
| | | | | 1 at 3′-end | |
| “Stab 16” | Ribo | 2′-O- | 5′ and 3′- | | Usually S |
| | | Methyl | ends | | |
| “Stab 17” | 2′-O-Methyl | 2′-O- | 5′ and 3′- | | Usually S |
| | | Methyl | ends | | |
| “Stab 18” | 2′-fluoro | 2′-O- | 5′ and 3′- | | Usually S |
| | | Methyl | ends | | |
| “Stab 19” | 2′-fluoro | 2′-O- | 3′-end | | S/AS |
| | | Methyl | | | |
| “Stab 20” | 2′-fluoro | 2′-deoxy | 3′-end | | Usually AS |
| “Stab 21” | 2′-fluoro | Ribo | 3′-end | | Usually AS |
| “Stab 22” | Ribo | Ribo | 3′-end | | Usually AS |
| “Stab 23” | 2′-fluoro* | 2′-deoxy* | 5′ and 3′- | | Usually S |
| | | | ends | | |
| “Stab 24” | 2′-fluoro* | 2′-O- | — | 1 at 3′-end | S/AS |
| | | Methyl* | | | |
| “Stab 25” | 2′-fluoro* | 2′-O- | — | 1 at 3′-end | S/AS |
| | | Methyl* | | | |
| “Stab 26” | 2′-fluoro* | 2′-O- | — | | S/AS |
| | | Methyl* | | | |
| “Stab 27” | 2′-fluoro* | 2′-O- | 3′-end | | S/AS |
| | | Methyl* | | | |
| “Stab 28” | 2′-fluoro* | 2′-O- | 3′-end | | S/AS |
| | | Methyl* | | | |
| “Stab 29” | 2′-fluoro* | 2′-O- | | 1 at 3′-end | S/AS |
| | | Methyl* | | | |
| “Stab 30” | 2′-fluoro* | 2′-O- | | | S/AS |
| | | Methyl* | | | |
| “Stab 31” | 2′-fluoro* | 2′-O- | 3′-end | | S/AS |
| | | Methyl* | | | |
| “Stab 32” | 2′-fluoro | 2′-O- | | | S/AS |
| | | Methyl | | | |
| “Stab 33” | 2′-fluoro | 2′-deoxy* | 5′ and 3′- | — | Usually S |
| | | | ends | | |
| “Stab 34” | 2′-fluoro | 2′-O- | 5′ and 3′- | | Usually S |
| | | Methyl* | ends | | |
| “Stab 35” | 2′-fluoro | 2′-O- | | | Usually AS |
| | | Methyl** | | | |
| “Stab 36” | 2′-fluoro | 2′-O- | | | Usually AS |
| | | Methyl** | | | |
| “Stab 3F” | 2′-OCF3 | Ribo | — | 4 at 5′-end | Usually S |
| | | | | 4 at 3′-end | |
| “Stab 4F” | 2′-OCF3 | Ribo | 5′ and 3′- | — | Usually S |
| | | | ends | | |
| “Stab 5F” | 2′-OCF3 | Ribo | — | 1 at 3′-end | Usually AS |
| “Stab 7F” | 2′-OCF3 | 2′-deoxy | 5′ and 3′- | — | Usually S |
| | | | ends | | |
| “Stab 8F” | 2′-OCF3 | 2′-O- | — | 1 at 3′-end | S/AS |
| | | Methyl | | | |
| “Stab 11F” | 2′-OCF3 | 2′-deoxy | — | 1 at 3′-end | Usually AS |
| “Stab 12F” | 2′-OCF3 | LNA | 5′ and 3′- | | Usually S |
| | | | ends | | |
| “Stab 13F” | 2′-OCF3 | LNA | | 1 at 3′-end | Usually AS |
| “Stab 14F” | 2′-OCF3 | 2′-deoxy | | 2 at 5′-end | Usually AS |
| | | | | 1 at 3′-end | |
| “Stab 15F” | 2′-OCF3 | 2′-deoxy | | 2 at 5′-end | Usually AS |
| | | | | 1 at 3′-end | |
| “Stab 18F” | 2′-OCF3 | 2′-O- | 5′ and 3′- | | Usually S |
| | | Methyl | ends | | |
| “Stab 19F” | 2′-OCF3 | 2′-O- | 3′-end | | S/AS |
| | | Methyl | | | |
| “Stab 20F” | 2′-OCF3 | 2′-deoxy | 3′-end | | Usually AS |
| “Stab 21F” | 2′-OCF3 | Ribo | 3′-end | | Usually AS |
| “Stab 23F” | 2′-OCF3* | 2′-deoxy* | 5′ and 3′- | | Usually S |
| | | | ends | | |
| “Stab 24F” | 2′-OCF3* | 2′-O- | — | 1 at 3′-end | S/AS |
| | | Methyl* | | | |
| “Stab 25F” | 2′-OCF3* | 2′-O- | — | 1 at 3′-end | S/AS |
| | | Methyl* | | | |
| “Stab 26F” | 2′-OCF3* | 2′-O- | — | | S/AS |
| | | Methyl* | | | |
| “Stab 27F” | 2′-OCF3* | 2′-O- | 3′-end | | S/AS |
| | | Methyl* | | | |
| “Stab 28F” | 2′-OCF3* | 2′-O- | 3′-end | | S/AS |
| | | Methyl* | | | |
| “Stab 29F” | 2′-OCF3* | 2′-O- | | 1 at 3′-end | S/AS |
| | | Methyl* | | | |
| “Stab 30F” | 2′-OCF3* | 2′-O- | | | S/AS |
| | | Methyl* | | | |
| “Stab 31F” | 2′-OCF3* | 2′-O- | 3′-end | | S/AS |
| | | Methyl* | | | |
| “Stab 32F” | 2′-OCF3 | 2′-O- | | | S/AS |
| | | Methyl | | | |
| “Stab 33F” | 2′-OCF3 | 2′-deoxy* | 5′ and 3′- | — | Usually S |
| | | | ends | | |
| “Stab 34F” | 2′-OCF3 | 2′-O- | 5′ and 3′- | | Usually S |
| | | Methyl* | ends | | |
| “Stab 35F” | 2′-OCF3 | 2′-O- | | | Usually AS |
| | | Methyl** | | | |
| “Stab 36F” | 2′-OCF3 | 2′-O- | | | Usually AS |
| | | Methyl** | | | |

CAP = any terminal cap, see for example FIG. 10.
All Stab 00-36 chemistries can comprise 3′-terminal thymidine (TT) residues
All Stab 00-36 chemistries typically comprise about 21 nucleotides, but can vary as described herein.
All Stab 00-36 chemistries can also include a single ribonucleotide in the sense or passenger strand at the 11^{th} base paired position of the double stranded nucleic acid duplex as determined from the 5′-end of the antisense or guide strand (see FIG. 6C)
S = sense strand
AS = antisense strand
*Stab 23 has a single ribonucleotide adjacent to 3′-CAP
*Stab 24 and Stab 28 have a single ribonucleotide at 5′-terminus
*Stab 25, Stab 26, and Stab 27 have three ribonucleotides at 5′-terminus
*Stab 29, Stab 30, Stab 31, Stab 33, and Stab 34 any purine at first three nucleotide positions from 5′-terminus are ribonucleotides
p = phosphorothioate linkage
**Stab 35 has 2′-O-methyl U at 3′-overhangs
**Stab 36 has 2′-O-methyl overhangs that are complementary to the target sequence (naturually occurring overhangs)

TABLE V

| | | | | | |
|---|---|---|---|---|---|
| Reagent | Equivalents | Amount | Wait Time* DNA | Wait Time* 2′-O-methyl | Wait Time* RNA |

A. 2.5 μmol Synthesis Cycle ABI 394 Instrument

| | | | | | | | | | |
|---|---|---|---|---|---|---|---|---|---|
| Phosphoramidites | 6.5 | 163 | μL | 45 | sec | 2.5 | min | 7.5 | min |
| S-Ethyl Tetrazole | 23.8 | 238 | μL | 45 | sec | 2.5 | min | 7.5 | min |
| Acetic Anhydride | 100 | 233 | μL | 5 | sec | 5 | sec | 5 | sec |
| N-Methyl | 186 | 233 | μL | 5 | sec | 5 | sec | 5 | sec |
| Imidazole | | | | | | | | | |
| TCA | 176 | 2.3 | mL | 21 | sec | 21 | sec | 21 | sec |
| Iodine | 11.2 | 1.7 | mL | 45 | sec | 45 | sec | 45 | sec |
| Beaucage | 12.9 | 645 | μL | 100 | sec | 300 | sec | 300 | sec |

| | | | | | | |
|---|---|---|---|---|---|---|
| Acetonitrile | NA | 6.67 | mL | NA | NA | NA |

B. 0.2 μmol Synthesis Cycle ABI 394 Instrument

| | | | | | | | | | |
|---|---|---|---|---|---|---|---|---|---|
| Phosphoramidites | 15 | 31 | μL | 45 | sec | 233 | sec | 465 | sec |
| S-Ethyl Tetrazole | 38.7 | 31 | μL | 45 | sec | 233 | min | 465 | sec |
| Acetic Anhydride | 655 | 124 | μL | 5 | sec | 5 | sec | 5 | sec |
| N-Methyl | 1245 | 124 | μL | 5 | sec | 5 | sec | 5 | sec |
| Imidazole | | | | | | | | | |
| TCA | 700 | 732 | μL | 10 | sec | 10 | sec | 10 | sec |
| Iodine | 20.6 | 244 | μL | 15 | sec | 15 | sec | 15 | sec |
| Beaucage | 7.7 | 232 | μL | 100 | sec | 300 | sec | 300 | sec |

| | | | | | | |
|---|---|---|---|---|---|---|
| Acetonitrile | NA | 2.64 | mL | NA | NA | NA |

C. 0.2 μmol Synthesis Cycle 96 well Instrument

| | Equivalents: DNA/ | Amount: DNA/ | | | | Wait Time* | | | |
|---|---|---|---|---|---|---|---|---|---|
| Reagent | 2′-O-methyl/Ribo | 2′-O-methyl/Ribo | | Wait Time* DNA | | 2′-O-methyl | | Wait Time* Ribo | |
| Phosphoramidites | 22/33/66 | 40/60/120 | μL | 60 | sec | 180 | sec | 360 | sec |
| S-Ethyl Tetrazole | 70/105/210 | 40/60/120 | μL | 60 | sec | 180 | min | 360 | sec |
| Acetic Anhydride | 265/265/265 | 50/50/50 | μL | 10 | sec | 10 | sec | 10 | sec |
| N-Methyl | 502/502/502 | 50/50/50 | μL | 10 | sec | 10 | sec | 10 | sec |
| Imidazole | | | | | | | | | |
| TCA | 238/475/475 | 250/500/500 | μL | 15 | sec | 15 | sec | 15 | sec |
| Iodine | 6.8/6.8/6.8 | 80/80/80 | μL | 30 | sec | 30 | sec | 30 | sec |
| Beaucage | 34/51/51 | 80/120/120 | | 100 | sec | 200 | sec | 200 | sec |

| | | | | | | |
|---|---|---|---|---|---|---|
| Acetonitrile | NA | 1150/1150/1150 | μL | NA | NA | NA |

Wait time does not include contact time during delivery.
Tandem synthesis utilizes double coupling of linker molecule

TABLE VI
Lipid Nanoparticle (LNP) Formulations

| Formulation | | |
|---|---|---|
| # | Composition | Molar Ratio |
| L051 | CLinDMA/DSPC/Chol/PEG-n-DMG | 48/40/10/2 |
| L053 | DMOBA/DSPC/Chol/PEG-n-DMG | 30/20/48/2 |
| L054 | DMOBA/DSPC/Chol/PEG-n-DMG | 50/20/28/2 |
| L069 | CLinDMA/DSPC/Cholesterol/PEG- | 48/40/10/2 |
| | Cholesterol | |
| L073 | pCLinDMA or CLin DMA/DMOBA/ | 25/25/20/28/2 |
| | DSPC/Chol/PEG-n-DMG | |
| L077 | eCLinDMA/DSPC/Cholesterol/ | 48/40/10/2 |
| | 2KPEG-Chol | |
| L080 | eCLinDMA/DSPC/Cholesterol/ | 48/40/10/2 |
| | 2KPEG-DMG | |
| L082 | pCLinDMA/DSPC/Cholesterol/ | 48/40/10/2 |
| | 2KPEG-DMG | |
| L083 | pCLinDMA/DSPC/Cholesterol/ | 48/40/10/2 |
| | 2KPEG-Chol | |
| L086 | CLinDMA/DSPC/Cholesterol/2KPEG- | 43/38/10/2/7 |
| | DMG/Linoleyl alcohol | |
| L061 | DMLBA/Cholesterol/2KPEG-DMG | 52/45/3 |
| L060 | DMOBA/Cholesterol/2KPEG-DMG N/P | 52/45/3 |
| | ratio of 5 | |
| L097 | DMLBA/DSPC/Cholesterol/2KPEG- | 50/20/28 |
| | DMG | |
| L098 | DMOBA/Cholesterol/2KPEG-DMG, | 52/45/3 |
| | N/P ratio of 3 | |
| L099 | DMOBA/Cholesterol/2KPEG-DMG, | 52/45/3 |
| | N/P ratio of 4 | |
| L100 | DMOBA/DOBA/3% PEG-DMG, N/P | 52/45/3 |
| | ratio of 3 | |
| L101 | DMOBA/Cholesterol/2KPEG- | 52/45/3 |
| | Cholesterol | |
| L102 | DMOBA/Cholesterol/2KPEG- | 52/45/3 |
| | Cholesterol, N/P ratio of 5 | |
| L103 | DMLBA/Cholesterol/2KPEG- | 52/45/3 |
| | Cholesterol | |
| L104 | CLinDMA/DSPC/Cholesterol/2KPEG- | 43/38/10/2/7 |
| | cholesterol/Linoleyl alcohol | |
| L105 | DMOBA/Cholesterol/2KPEG-Chol, N/P | 52/45/3 |
| | ratio of 2 | |
| L106 | DMOBA/Cholesterol/2KPEG-Chol, N/P | 67/30/3 |
| | ratio of 3 | |
| L107 | DMOBA/Cholesterol/2KPEG-Chol, N/P | 52/45/3 |
| | ratio of 1.5 | |
| L108 | DMOBA/Cholesterol/2KPEG-Chol, N/P | 67/30/3 |
| | ratio of 2 | |
| L109 | DMOBA/DSPC/Cholesterol/2KPEG- | 50/20/28/2 |
| | Chol, N/P ratio of 2 | |
| L110 | DMOBA/Cholesterol/2KPEG-DMG, | 52/45/3 |
| | N/P ratio of 1.5 | |
| L111 | DMOBA/Cholesterol/2KPEG-DMG, | 67/30/3 |
| | N/P ratio of 1.5 | |
| L112 | DMLBA/Cholesterol/2KPEG-DMG, N/P | 52/45/3 |
| | ratio of 1.5 | |
| L113 | DMLBA/Cholesterol/2KPEG-DMG, N/P | 67/30/3 |
| | ratio of 1.5 | |
| L114 | DMOBA/Cholesterol/2KPEG-DMG, | 52/45/3 |
| | N/P ratio of 2 | |
| L115 | DMOBA/Cholesterol/2KPEG-DMG, | 67/30/3 |
| | N/P ratio of 2 | |
| L116 | DMLBA/Cholesterol/2KPEG-DMG, | 52/45/3 |
| | N/P ratio of 2 | |
| L117 | DMLBA/Cholesterol/2KPEG-DMG, N/P | 52/45/3 |
| | ratio of 2 | |

N/P ratio = Nitrogen:Phosphorous ratio between cationic lipid and nucleic acid

[chemical structure]

[chemical structure]

TABLE VII
Table VII: Sirna algorithm describing patterns with their relative score
for predicting hyper-active siNAs. All the positions given are for the
sense strand of 19-mer siNA.

| Description of pattern | Pattern # | Score |
|---|---|---|
| G or C at position 1 | 1 | 5 |
| A or U at position 19 | 2 | 10 |
| A/U rich between position 15-19 | 3 | 10 |
| String of 4 Gs or 4 Cs (not preferred) | 4 | −100 |
| G/C rich between position 1-5 | 5 | 10 |
| A or U at position 18 | 6 | 5 |
| A or U at position 10 | 7 | 10 |
| G at position 13 (not preferred) | 8 | −3 |
| A at position 13 | 9 | 3 |
| G at position 9 (not preferred) | 10 | −3 |
| A at position 9 | 11 | 3 |
| A or U at position 14 | 12 | 10 |

What we claim is:

1. A double stranded nucleic acid molecule having structure SIX comprising a sense strand and an antisense strand: [chemical structure]
wherein the upper strand is the sense strand and the lower strand is the antisense strand of the double stranded nucleic acid molecule; said antisense strand comprises sequence complementary to a Sterol Regulatory Element-Binding Protein 1 (SREBP1) RNA; each N is independently a nucleotide; each B is a terminal cap moiety that can be present or absent; (N) represents non-base paired or overhanging nucleotides which can be unmodified or chemically modified; [N] represents nucleotide positions that are ribonucleotides; X1 and X2 are independently integers from about 0 to about 4; X3 is an integer from about 9 to about 30; X4 is an integer from about 11 to about 30, provided that the sum of X4 and X5 is about 17-36; X5 is an integer from about 1 to about 6; and
(a) any pyrimidine nucleotides present in the antisense strand are 2′-deoxy-2′-fluoro nucleotides; any purine nucleotides present in the antisense strand other than the purines nucleotides in the [N] nucleotide positions, are independently 2′-O-methyl nucleotides, 2′-deoxyribonucleotides or a combination of 2′-deoxyribonucleotides and 2′-O-methyl nucleotides;
(b) any pyrimidine nucleotides present in the sense strand are 2′-deoxy-2′-fluoro nucleotides; any purine nucleotides present in the sense strand are independently 2′-deoxyribonucleotides, 2′-O-methyl nucleotides or a combination of 2′-deoxyribonucleotides and 2′-O-methyl nucleotides; and
(c) any (N) nucleotides are optionally 2′-O-methyl, 2′-deoxy-2′-fluoro, or deoxyribonucleotides.

2. A double stranded nucleic acid molecule having structure SX comprising a sense strand and an antisense strand: [chemical structure]
wherein the upper strand is the sense strand and the lower strand is the antisense strand of the double stranded nucleic acid molecule; said antisense strand comprises sequence complementary to a Sterol Regulatory Element-Binding Protein 1 (SREBP1) RNA; each N is independently a nucleotide; each B is a terminal cap moiety that can be present or absent; (N) represents non-base paired or overhanging nucleotides which can be unmodified or chemically modified; [N] represents nucleotide positions that are ribonucleotides; X1 and X2 are independently integers from about 0 to about 4; X3 is an integer from about 9 to about 30; X4 is an integer from about 11 to about 30, provided that the sum of X4 and X5 is about 17-36; X5 is an integer from about 1 to about 6; and
(a) any pyrimidine nucleotides present in the antisense strand are 2′-deoxy-2′-fluoro nucleotides; any purine nucleotides present in the antisense strand other than the purines nucleotides in the [N] nucleotide positions, are 2′-O-methyl nucleotides;
(b) any pyrimidine nucleotides present in the sense strand are ribonucleotides; any purine nucleotides present in the sense strand are ribonucleotides; and
(c) any (N) nucleotides are optionally 2′-O-methyl, 2′-deoxy-2′-fluoro, or deoxyribonucleotides.

3. A double stranded nucleic acid molecule having structure SXI comprising a sense strand and an antisense strand: [chemical structure]
wherein the upper strand is the sense strand and the lower strand is the antisense strand of the double stranded nucleic acid molecule; said antisense strand comprises sequence complementary to a Sterol Regulatory Element-Binding Protein 1 (SREBP1) RNA; each N is independently a nucleotide; each B is a terminal cap moiety that can be present or absent; (N) represents non-base paired or overhanging nucleotides which can be unmodified or chemically modified; [N] represents nucleotide positions that are ribonucleotides; X1 and X2 are independently integers from about 0 to about 4; X3 is an integer from about 9 to about 30; X4 is an integer from about 11 to about 30, provided that the sum of X4 and X5 is about 17-36; X5 is an integer from about 1 to about 6; and
(a) any pyrimidine nucleotides present in the antisense strand are 2′-deoxy-2′-fluoro nucleotides; any purine nucleotides present in the antisense strand other than the purines nucleotides in the [N] nucleotide positions, are 2′-O-methyl nucleotides;
(b) any pyrimidine nucleotides present in the sense strand are 2′-deoxy-2′-fluoro nucleotides; any purine nucleotides present in the sense strand are ribonucleotides; and
(c) any (N) nucleotides are optionally 2′-O-methyl, 2′-deoxy-2′-fluoro, or deoxyribonucleotides.

4. A double stranded nucleic acid molecule having structure SXII comprising a sense strand and an antisense strand: [chemical structure]
wherein the upper strand is the sense strand and the lower strand is the antisense strand of the double stranded nucleic acid molecule; said antisense strand comprises sequence complementary to a Sterol Regulatory Element-Binding Protein 1 (SREBP1) RNA; each N is independently a nucleotide; each B is a terminal cap moiety that can be present or absent; (N) represents non-base paired or overhanging nucleotides which can be unmodified or chemically modified; [N] represents nucleotide positions that are ribonucleotides; X1 and X2 are independently integers from about 0 to about 4; X3 is an integer from about 9 to about 30; X4 is an integer from about 11 to about 30, provided that the sum of X4 and X5 is about 17-36; X5 is an integer from about 1 to about 6; and
(a) any pyrimidine nucleotides present in the antisense strand are 2′-deoxy-2′-fluoro nucleotides; any purine nucleotides present in the antisense strand other than the purines nucleotides in the [N] nucleotide positions, are 2′-O-methyl nucleotides;
(b) any pyrimidine nucleotides present in the sense strand are 2′-deoxy-2′-fluoro nucleotides; any purine nucleotides present in the sense strand are deoxyribonucleotides; and
(c) any (N) nucleotides are optionally 2′-O-methyl, 2′-deoxy-2′-fluoro, or deoxyribonucleotides.

5. A double stranded nucleic acid molecule having structure SXIII comprising a sense strand and an antisense strand: [chemical structure]
wherein the upper strand is the sense strand and the lower strand is the antisense strand of the double stranded nucleic acid molecule; said antisense strand comprises sequence complementary to a Sterol Regulatory Element-Binding Protein 1 (SREBP1) RNA; each N is independently a nucleotide; each B is a terminal cap moiety that can be present or absent; (N) represents non-base paired or overhanging nucleotides which can be unmodified or chemically modified; [N] represents nucleotide that are ribonucleotides; X1 and X2 are independently integers from about 0 to about 4; X3 is an integer from about 9 to about 30; X4 is an integer from about 11 to about 30, provided that the sum of X4 and X5 is about 17-36; X5 is an integer from about 1 to about 6; and
(a) any pyrimidine nucleotides present in the antisense strand are nucleotides having a ribo-like, Northern or A-form helix configuration; any purine nucleotides present in the antisense strand other than the purines nucleotides in the [N] nucleotide positions, are 2′-O-methyl nucleotides;
(b) any pyrimidine nucleotides present in the sense strand are nucleotides having a ribo-like, Northern or A-form helix configuration; any purine nucleotides present in the sense strand are 2′-O-methyl nucleotides; and
(c) any (N) nucleotides are optionally 2′-O-methyl, 2′-deoxy-2′-fluoro, or deoxyribonucleotides.

6. The double stranded nucleic acid molecule of claim 1, wherein X5=1, 2, or 3; each X1 and X2=1 or 2; X3=12, 13, 14, 15, 16, 17, 18, 19, 20, 21, 22, 23, 24, 25, 26, 27, 28, 29, or 30, and X4=15, 16, 17, 18, 19, 20, 21, 22, 23, 24, 25, 26, 27, 28, 29, or 30.

7. The double stranded nucleic acid molecule of claim 2, wherein X5=1, 2, or 3; each X1 and X2=1 or 2; X3=12, 13, 14, 15, 16, 17, 18, 19, 20, 21, 22, 23, 24, 25, 26, 27, 28, 29, or 30, and X4=15, 16, 17, 18, 19, 20, 21, 22, 23, 24, 25, 26, 27, 28, 29, or 30.

8. The double stranded nucleic acid molecule of claim 3, wherein X5=1, 2, or 3; each X1 and X2=1 or 2; X3=12, 13, 14, 15, 16, 17, 18, 19, 20, 21, 22, 23, 24, 25, 26, 27, 28, 29, or 30, and X4=15, 16, 17, 18, 19, 20, 21, 22, 23, 24, 25, 26, 27, 28, 29, or 30.

9. The double stranded nucleic acid molecule of claim 4, wherein X5=1, 2, or 3; each X1 and X2=1 or 2; X3=12, 13, 14, 15, 16, 17, 18, 19, 20, 21, 22, 23, 24, 25, 26, 27, 28, 29, or 30, and X4=15, 16, 17, 18, 19, 20, 21, 22, 23, 24, 25, 26, 27, 28, 29, or 30.

10. The double stranded nucleic acid molecule of claim 5, wherein X5=1, 2, or 3; each X1 and X2=1 or 2; X3=12, 13, 14, 15, 16, 17, 18, 19, 20, 21, 22, 23, 24, 25, 26, 27, 28, 29, or 30, and X4=15, 16, 17, 18, 19, 20, 21, 22, 23, 24, 25, 26, 27, 28, 29, or 30.

11. The double stranded nucleic acid molecule of claim 1, wherein B is present at the 3′ and 5′ ends of the sense strand and at the 3′-end of the antisense strand.

12. The double stranded nucleic acid molecule of claim 2, wherein B is present at the 3′ and 5′ ends of the sense strand and at the 3′-end of the antisense strand.

13. The double stranded nucleic acid molecule of claim 3, wherein B is present at the 3′ and 5′ ends of the sense strand and at the 3′-end of the antisense strand.

14. The double stranded nucleic acid molecule of claim 4, wherein B is present at the 3′ and 5′ ends of the sense strand and at the 3′-end of the antisense strand.

15. The double stranded nucleic acid molecule of claim 5, wherein B is present at the 3′ and 5′ ends of the sense strand and at the 3′-end of the antisense strand.

16. The double stranded nucleic acid molecule of claim 1, comprising one or more phosphorothioate internucleotide linkages at the first terminal (N) on the 3′ end of the sense strand, antisense strand, or both sense strand and antisense strands of the siNA molecule.

17. The double stranded nucleic acid molecule of claim 2, comprising one or more phosphorothioate internucleotide linkages at the first terminal (N) on the 3′ end of the sense strand, antisense strand, or both sense strand and antisense strands of the siNA molecule.

18. The double stranded nucleic acid molecule of claim 3, comprising one or more phosphorothioate internucleotide linkages at the first terminal (N) on the 3′ end of the sense strand, antisense strand, or both sense strand and antisense strands of the siNA molecule.

19. The double stranded nucleic acid molecule of claim 4, comprising one or more phosphorothioate internucleotide linkages at the first terminal (N) on the 3′ end of the sense strand, antisense strand, or both sense strand and antisense strands of the siNA molecule.

20. The double stranded nucleic acid molecule of claim 5, comprising one or more phosphorothioate internucleotide linkages at the first terminal (N) on the 3′ end of the sense strand, antisense strand, or both sense strand and antisense strands of the siNA molecule.

21. A composition comprising the double stranded nucleic acid molecule of claim 1 in a pharmaceutically acceptable carrier or diluent.

The application's sequence listing, which the Patent Office published only in electronic form, follows.

SEQUENCE LISTING (3556 sequences)

SEQ ID NO: 1 - RNA, 19 nt, Artificial Sequence
  Description of Artificial Sequence: Target Sequence/siNA sense region
cagagcugcggccggggga

SEQ ID NO: 2 - RNA, 19 nt, Artificial Sequence
  Description of Artificial Sequence: Target Sequence/siNA antisense region
ucccccggccgcagcucug

SEQ ID NO: 3 - DNA, 21 bp, Artificial Sequence
  Description of Artificial Sequence: Target Sequence/siNA sense region (stab00)
  misc_feature (1)..(19): ribonucleotide unmodified or modified as described for this sequence
cagagcugcggccgggggatt

SEQ ID NO: 4 - DNA, 21 bp, Artificial Sequence
  Description of Artificial Sequence: Target Sequence/siNA antisense region (stab00as)
  misc_feature (1)..(19): ribonucleotide unmodified or modified as described for this sequence
ucccccggccgcagcucugtt

SEQ ID NO: 5 - DNA, 21 bp, Artificial Sequence
  Description of Artificial Sequence: Target Sequence/siNA sense region (stab04)
  misc_feature (1)..(1): 5'-3 attached terminal deoxyabasic moiety, inverted abasic, inverted nucleotide or other terminal cap that is optionally present
  misc_feature (21)..(21): 3'-3 attached terminal deoxyabasic moiety, inverted abasic, inverted nucleotide or other terminal cap that is optionally present
  misc_feature (1)..(1): 2'-deoxy-2'Fluoro
  misc_feature (6)..(7): 2'-deoxy-2'Fluoro
  misc_feature (9)..(9): 2'-deoxy-2'Fluoro
  misc_feature (12)..(13): 2'-deoxy-2'Fluoro
  misc_feature (1)..(19): ribonucleotide unmodified or modified as described for this sequence
cagagcugcggccgggggatt

SEQ ID NO: 6 - DNA, 21 bp, Artificial Sequence
  Description of Artificial Sequence: Target Sequence/siNA antisense region (stab05)
  misc_feature (1)..(6): 2'-deoxy-2'Fluoro
  misc_feature (9)..(10): 2'-deoxy-2'Fluoro
  misc_feature (12)..(12): 2'-deoxy-2'Fluoro
  misc_feature (15)..(18): 2'-deoxy-2'Fluoro
  misc_feature (20)..(20): Phosphorothioate or Phosphorodithioate 3'-Internucleotide Linkage (optionally present)
  misc_feature (1)..(19): ribonucleotide unmodified or modified as described for this sequence
ucccccggccgcagcucugtt

SEQ ID NO: 7 - DNA, 21 bp, Artificial Sequence
  Description of Artificial Sequence: Target Sequence/siNA sense region (stab07)
  misc_feature (1)..(1): 5'-3 attached terminal deoxyabasic moiety, inverted abasic, inverted nucleotide or other terminal cap that is optionally present
  misc_feature (21)..(21): 3'-3 attached terminal deoxyabasic moiety, inverted abasic, inverted nucleotide or other terminal cap that is optionally present
  misc_feature (1)..(1): 2'-deoxy-2'Fluoro
  misc_feature (6)..(7): 2'-deoxy-2'Fluoro
  misc_feature (9)..(9): 2'-deoxy-2'Fluoro
  misc_feature (12)..(13): 2'-deoxy-2'Fluoro
  misc_feature (1)..(19): ribonucleotide unmodified or modified as described for this sequence
cagagcugcggccgggggatt

SEQ ID NO: 8 - DNA, 21 bp, Artificial Sequence
  Description of Artificial Sequence: Target Sequence/siNA antisense region (stab08)
  misc_feature (1)..(6): 2'-deoxy-2'Fluoro
  misc_feature (7)..(8): 2'-O-methyl
  misc_feature (9)..(10): 2'-deoxy-2'Fluoro
  misc_feature (11)..(11): 2'-O-methyl
  misc_feature (12)..(12): 2'-deoxy-2'Fluoro
  misc_feature (13)..(14): 2'-O-methyl
  misc_feature (15)..(18): 2'-deoxy-2'Fluoro
  misc_feature (19)..(19): 2'-O-methyl
  misc_feature (20)..(20): Phosphorothioate or Phosphorodithioate 3'-Internucleotide Linkage (optionally present)
  misc_feature (1)..(19): ribonucleotide unmodified or modified as described for this sequence
ucccccggccgcagcucugtt

SEQ ID NO: 9 - DNA, 21 bp, Artificial Sequence
  Description of Artificial Sequence: Target Sequence/siNA sense region (stab09)
  misc_feature (1)..(1): 5'-3 attached terminal deoxyabasic moiety, inverted abasic, inverted nucleotide or other terminal cap that is optionally present
  misc_feature (21)..(21): 3'-3 attached terminal deoxyabasic moiety, inverted abasic, inverted nucleotide or other terminal cap that is optionally present
  misc_feature (1)..(19): ribonucleotide unmodified or modified as described for this sequence
cagagcugcggccgggggatt

SEQ ID NO: 10 - DNA, 21 bp, Artificial Sequence
  Description of Artificial Sequence: Target Sequence/siNA antisense region (stab10)
  misc_feature (20)..(20): Phosphorothioate or Phosphorodithioate 3'-Internucleotide Linkage (optionally present)
  misc_feature (1)..(19): ribonucleotide unmodified or modified as described for this sequence
ucccccggccgcagcucugtt

SEQ ID NO: 11 - DNA, 21 bp, Artificial Sequence
  Description of Artificial Sequence: Target Sequence/siNA antisense region (stab19)
  misc_feature (21)..(21): 3'-3 attached terminal deoxyabasic moiety, inverted abasic, inverted nucleotide or other terminal cap that is optionally present
  misc_feature (1)..(6): 2'-deoxy-2'Fluoro
  misc_feature (7)..(8): 2'-O-methyl
  misc_feature (9)..(10): 2'-deoxy-2'Fluoro
  misc_feature (11)..(11): 2'-O-methyl
  misc_feature (12)..(12): 2'-deoxy-2'Fluoro
  misc_feature (13)..(14): 2'-O-methyl
  misc_feature (15)..(18): 2'-deoxy-2'Fluoro
  misc_feature (19)..(19): 2'-O-methyl
  misc_feature (1)..(19): ribonucleotide unmodified or modified as described for this sequence
ucccccggccgcagcucugtt

SEQ ID NO: 12 - DNA, 21 bp, Artificial Sequence
  Description of Artificial Sequence: Target Sequence/siNA antisense region (stab22)
  misc_feature (21)..(21): 3'-3 attached terminal deoxyabasic moiety, inverted abasic, inverted nucleotide or other terminal cap that is optionally present
  misc_feature (20)..(20): Phosphorothioate or Phosphorodithioate 3'-Internucleotide Linkage (optionally present)
  misc_feature (1)..(19): ribonucleotide unmodified or modified as described for this sequence
ucccccggccgcagcucugtt

SEQ ID NO: 13 - DNA, 21 bp, Artificial Sequence
  Description of Artificial Sequence: Target Sequence/siNA antisense region (stab25)
  misc_feature (4)..(6): 2'-deoxy-2'Fluoro
  misc_feature (7)..(8): 2'-O-methyl
  misc_feature (9)..(10): 2'-deoxy-2'Fluoro
  misc_feature (11)..(11): 2'-O-methyl
  misc_feature (12)..(12): 2'-deoxy-2'Fluoro
  misc_feature (13)..(14): 2'-O-methyl
  misc_feature (15)..(18): 2'-deoxy-2'Fluoro
  misc_feature (19)..(19): 2'-O-methyl
  misc_feature (20)..(20): Phosphorothioate or Phosphorodithioate 3'-Internucleotide Linkage (optionally present)
  misc_feature (1)..(19): ribonucleotide unmodified or modified as described for this sequence
ucccccggccgcagcucugtt

SEQ ID NO: 14 - RNA, 21 nt, Artificial Sequence
  Description of Artificial Sequence: Target Sequence/siNA antisense region (stab35)
  misc_feature (4)..(6): 2'-deoxy-2'Fluoro
  misc_feature (7)..(8): 2'-O-methyl
  misc_feature (9)..(10): 2'-deoxy-2'Fluoro
  misc_feature (11)..(11): 2'-O-methyl
  misc_feature (12)..(12): 2'-deoxy-2'Fluoro
  misc_feature (13)..(14): 2'-O-methyl
  misc_feature (15)..(18): 2'-deoxy-2'Fluoro
  misc_feature (19)..(21): 2'-O-methyl
ucccccggccgcagcucuguu

SEQ ID NO: 15 - RNA, 21 nt, Artificial Sequence
  Description of Artificial Sequence: Target Sequence/siNA antisense region (stab36)
  misc_feature (4)..(6): 2'-deoxy-2'Fluoro
  misc_feature (7)..(8): 2'-O-methyl
  misc_feature (9)..(10): 2'-deoxy-2'Fluoro
  misc_feature (11)..(11): 2'-O-methyl
  misc_feature (12)..(12): 2'-deoxy-2'Fluoro
  misc_feature (13)..(14): 2'-O-methyl
  misc_feature (15)..(18): 2'-deoxy-2'Fluoro
  misc_feature (19)..(21): 2'-O-methyl
ucccccggccgcagcucugcu

SEQ ID NO: 16 - RNA, 19 nt, Artificial Sequence
  Description of Artificial Sequence: Target Sequence/siNA sense region
aacccaguuuccgaggaac

SEQ ID NO: 17 - RNA, 19 nt, Artificial Sequence
  Description of Artificial Sequence: Target Sequence/siNA antisense region
guuccucggaaacuggguu

SEQ ID NO: 18 - DNA, 21 bp, Artificial Sequence
  Description of Artificial Sequence: Target Sequence/siNA sense region (stab00)
  misc_feature (1)..(19): ribonucleotide unmodified or modified as described for this sequence
aacccaguuuccgaggaactt

SEQ ID NO: 19 - DNA, 21 bp, Artificial Sequence
  Description of Artificial Sequence: Target Sequence/siNA antisense region (stab00as)
  misc_feature (1)..(19): ribonucleotide unmodified or modified as described for this sequence
guuccucggaaacuggguutt

SEQ ID NO: 20 - DNA, 21 bp, Artificial Sequence
  Description of Artificial Sequence: Target Sequence/siNA sense region (stab04)
  misc_feature (1)..(1): 5'-3 attached terminal deoxyabasic moiety, inverted abasic, inverted nucleotide or other terminal cap that is optionally present
  misc_feature (21)..(21): 3'-3 attached terminal deoxyabasic moiety, inverted abasic, inverted nucleotide or other terminal cap that is optionally present
  misc_feature (3)..(5): 2'-deoxy-2'Fluoro
  misc_feature (8)..(12): 2'-deoxy-2'Fluoro
  misc_feature (19)..(19): 2'-deoxy-2'Fluoro
  misc_feature (1)..(19): ribonucleotide unmodified or modified as described for this sequence
aacccaguuuccgaggaactt

SEQ ID NO: 21 - DNA, 21 bp, Artificial Sequence
  Description of Artificial Sequence: Target Sequence/siNA antisense region (stab05)
  misc_feature (2)..(7): 2'-deoxy-2'Fluoro
  misc_feature (13)..(14): 2'-deoxy-2'Fluoro
  misc_feature (18)..(19): 2'-deoxy-2'Fluoro
  misc_feature (20)..(20): Phosphorothioate or Phosphorodithioate 3'-Internucleotide Linkage (optionally present)
  misc_feature (1)..(19): ribonucleotide unmodified or modified as described for this sequence
guuccucggaaacuggguutt

SEQ ID NO: 22 - DNA, 21 bp, Artificial Sequence
  Description of Artificial Sequence: Target Sequence/siNA sense region (stab07)
  misc_feature (1)..(1): 5'-3 attached terminal deoxyabasic moiety, inverted abasic, inverted nucleotide or other terminal cap that is optionally present
  misc_feature (21)..(21): 3'-3 attached terminal deoxyabasic moiety, inverted abasic, inverted nucleotide or other terminal cap that is optionally present
  misc_feature (3)..(5): 2'-deoxy-2'Fluoro
  misc_feature (8)..(12): 2'-deoxy-2'Fluoro
  misc_feature (19)..(19): 2'-deoxy-2'Fluoro
  misc_feature (1)..(19): ribonucleotide unmodified or modified as described for this sequence
aacccaguuuccgaggaactt

SEQ ID NO: 23 - DNA, 21 bp, Artificial Sequence
  Description of Artificial Sequence: Target Sequence/siNA antisense region (stab08)
  misc_feature (1)..(1): 2'-O-methyl
  misc_feature (2)..(7): 2'-deoxy-2'Fluoro
  misc_feature (8)..(12): 2'-O-methyl
  misc_feature (13)..(14): 2'-deoxy-2'Fluoro
  misc_feature (15)..(17): 2'-O-methyl
  misc_feature (18)..(19): 2'-deoxy-2'Fluoro
  misc_feature (20)..(20): Phosphorothioate or Phosphorodithioate 3'-Internucleotide Linkage (optionally present)
  misc_feature (1)..(19): ribonucleotide unmodified or modified as described for this sequence
guuccucggaaacuggguutt

SEQ ID NO: 24 - DNA, 21 bp, Artificial Sequence
  Description of Artificial Sequence: Target Sequence/siNA sense region (stab09)
  misc_feature (1)..(1): 5'-3 attached terminal deoxyabasic moiety, inverted abasic, inverted nucleotide or other terminal cap that is optionally present
  misc_feature (21)..(21): 3'-3 attached terminal deoxyabasic moiety, inverted abasic, inverted nucleotide or other terminal cap that is optionally present
  misc_feature (1)..(19): ribonucleotide unmodified or modified as described for this sequence
aacccaguuuccgaggaactt

SEQ ID NO: 25 - DNA, 21 bp, Artificial Sequence
  Description of Artificial Sequence: Target Sequence/siNA antisense region (stab10)
  misc_feature (20)..(20): Phosphorothioate or Phosphorodithioate 3'-Internucleotide Linkage (optionally present)
  misc_feature (1)..(19): ribonucleotide unmodified or modified as described for this sequence
guuccucggaaacuggguutt

SEQ ID NO: 26 - DNA, 21 bp, Artificial Sequence
  Description of Artificial Sequence: Target Sequence/siNA antisense region (stab19)
  misc_feature (21)..(21): 3'-3 attached terminal deoxyabasic moiety, inverted abasic, inverted nucleotide or other terminal cap that is optionally present
  misc_feature (1)..(1): 2'-O-methyl
  misc_feature (2)..(7): 2'-deoxy-2'Fluoro
  misc_feature (8)..(12): 2'-O-methyl
  misc_feature (13)..(14): 2'-deoxy-2'Fluoro
  misc_feature (15)..(17): 2'-O-methyl
  misc_feature (18)..(19): 2'-deoxy-2'Fluoro
  misc_feature (1)..(19): ribonucleotide unmodified or modified as described for this sequence
guuccucggaaacuggguutt

SEQ ID NO: 27 - DNA, 21 bp, Artificial Sequence
  Description of Artificial Sequence: Target Sequence/siNA antisense region (stab22)
  misc_feature (21)..(21): 3'-3 attached terminal deoxyabasic moiety, inverted abasic, inverted nucleotide or other terminal cap that is optionally present
  misc_feature (20)..(20): Phosphorothioate or Phosphorodithioate 3'-Internucleotide Linkage (optionally present)
  misc_feature (1)..(19): ribonucleotide unmodified or modified as described for this sequence
guuccucggaaacuggguutt

SEQ ID NO: 28 - DNA, 21 bp, Artificial Sequence
  Description of Artificial Sequence: Target Sequence/siNA antisense region (stab25)
  misc_feature (4)..(7): 2'-deoxy-2'Fluoro
  misc_feature (8)..(12): 2'-O-methyl
  misc_feature (13)..(14): 2'-deoxy-2'Fluoro
  misc_feature (15)..(17): 2'-O-methyl
  misc_feature (18)..(19): 2'-deoxy-2'Fluoro
  misc_feature (20)..(20): Phosphorothioate or Phosphorodithioate 3'-Internucleotide Linkage (optionally present)
  misc_feature (1)..(19): ribonucleotide unmodified or modified as described for this sequence
guuccucggaaacuggguutt

SEQ ID NO: 29 - RNA, 21 nt, Artificial Sequence
  Description of Artificial Sequence: Target Sequence/siNA antisense region (stab35)
  misc_feature (4)..(7): 2'-deoxy-2'Fluoro
  misc_feature (8)..(12): 2'-O-methyl
  misc_feature (13)..(14): 2'-deoxy-2'Fluoro
  misc_feature (15)..(17): 2'-O-methyl
  misc_feature (18)..(19): 2'-deoxy-2'Fluoro
  misc_feature (20)..(21): 2'-O-methyl
guuccucggaaacuggguuuu

SEQ ID NO: 30 - RNA, 21 nt, Artificial Sequence
  Description of Artificial Sequence: Target Sequence/siNA antisense region (stab36)
  misc_feature (4)..(7): 2'-deoxy-2'Fluoro
  misc_feature (8)..(12): 2'-O-methyl
  misc_feature (13)..(14): 2'-deoxy-2'Fluoro
  misc_feature (15)..(17): 2'-O-methyl
  misc_feature (18)..(19): 2'-deoxy-2'Fluoro
  misc_feature (20)..(21): 2'-O-methyl
guuccucggaaacuggguucc

SEQ ID NO: 31 - RNA, 19 nt, Artificial Sequence
  Description of Artificial Sequence: Target Sequence/siNA sense region
cuuuucgccggcgccgggc

SEQ ID NO: 32 - RNA, 19 nt, Artificial Sequence
  Description of Artificial Sequence: Target Sequence/siNA antisense region
gcccggcgccggcgaaaag

SEQ ID NO: 33 - DNA, 21 bp, Artificial Sequence
  Description of Artificial Sequence: Target Sequence/siNA sense region (stab00)
  misc_feature (1)..(19): ribonucleotide unmodified or modified as described for this sequence
cuuuucgccggcgccgggctt

SEQ ID NO: 34 - DNA, 21 bp, Artificial Sequence
  Description of Artificial Sequence: Target Sequence/siNA antisense region (stab00as)
  misc_feature (1)..(19): ribonucleotide unmodified or modified as described for this sequence
gcccggcgccggcgaaaagtt

SEQ ID NO: 35 - DNA, 21 bp, Artificial Sequence
  Description of Artificial Sequence: Target Sequence/siNA sense region (stab04)
  misc_feature (1)..(1): 5'-3 attached terminal deoxyabasic moiety, inverted abasic, inverted nucleotide or other terminal cap that is optionally present
  misc_feature (21)..(21): 3'-3 attached terminal deoxyabasic moiety, inverted abasic, inverted nucleotide or other terminal cap that is optionally present
  misc_feature (1)..(6): 2'-deoxy-2'Fluoro
  misc_feature (8)..(9): 2'-deoxy-2'Fluoro
  misc_feature (12)..(12): 2'-deoxy-2'Fluoro
  misc_feature (14)..(15): 2'-deoxy-2'Fluoro
  misc_feature (19)..(19): 2'-deoxy-2'Fluoro
  misc_feature (1)..(19): ribonucleotide unmodified or modified as described for this sequence
cuuuucgccggcgccgggctt

SEQ ID NO: 36 - DNA, 21 bp, Artificial Sequence
  Description of Artificial Sequence: Target Sequence/siNA antisense region (stab05)
  misc_feature (2)..(4): 2'-deoxy-2'Fluoro
  misc_feature (7)..(7): 2'-deoxy-2'Fluoro
  misc_feature (9)..(10): 2'-deoxy-2'Fluoro
  misc_feature (13)..(13): 2'-deoxy-2'Fluoro
  misc_feature (20)..(20): Phosphorothioate or Phosphorodithioate 3'-Internucleotide Linkage (optionally present)
  misc_feature (1)..(19): ribonucleotide unmodified or modified as described for this sequence
gcccggcgccggcgaaaagtt

SEQ ID NO: 37 - DNA, 21 bp, Artificial Sequence
  Description of Artificial Sequence: Target Sequence/siNA sense region (stab07)
  misc_feature (1)..(1): 5'-3 attached terminal deoxyabasic moiety, inverted abasic, inverted nucleotide or other terminal cap that is optionally present
  misc_feature (21)..(21): 3'-3 attached terminal deoxyabasic moiety, inverted abasic, inverted nucleotide or other terminal cap that is optionally present
  misc_feature (1)..(6): 2'-deoxy-2'Fluoro
  misc_feature (8)..(9): 2'-deoxy-2'Fluoro
  misc_feature (12)..(12): 2'-deoxy-2'Fluoro
  misc_feature (14)..(15): 2'-deoxy-2'Fluoro
  misc_feature (19)..(19): 2'-deoxy-2'Fluoro
  misc_feature (1)..(19): ribonucleotide unmodified or modified as described for this sequence
cuuuucgccggcgccgggctt

SEQ ID NO: 38 - DNA, 21 bp, Artificial Sequence
  Description of Artificial Sequence: Target Sequence/siNA antisense region (stab08)
  misc_feature (1)..(1): 2'-O-methyl
  misc_feature (2)..(4): 2'-deoxy-2'Fluoro
  misc_feature (5)..(6): 2'-O-methyl
  misc_feature (7)..(7): 2'-deoxy-2'Fluoro
  misc_feature (8)..(8): 2'-O-methyl
  misc_feature (9)..(10): 2'-deoxy-2'Fluoro
  misc_feature (11)..(12): 2'-O-methyl
  misc_feature (13)..(13): 2'-deoxy-2'Fluoro
  misc_feature (14)..(19): 2'-O-methyl
  misc_feature (20)..(20): Phosphorothioate or Phosphorodithioate 3'-Internucleotide Linkage (optionally present)
  misc_feature (1)..(19): ribonucleotide unmodified or modified as described for this sequence
gcccggcgccggcgaaaagtt

SEQ ID NO: 39 - DNA, 21 bp, Artificial Sequence
  Description of Artificial Sequence: Target Sequence/siNA sense region (stab09)
  misc_feature (1)..(1): 5'-3 attached terminal deoxyabasic moiety, inverted abasic, inverted nucleotide or other terminal cap that is optionally present
  misc_feature (21)..(21): 3'-3 attached terminal deoxyabasic moiety, inverted abasic, inverted nucleotide or other terminal cap that is optionally present
  misc_feature (1)..(19): ribonucleotide unmodified or modified as described for this sequence
cuuuucgccggcgccgggctt

SEQ ID NO: 40 - DNA, 21 bp, Artificial Sequence
  Description of Artificial Sequence: Target Sequence/siNA antisense region (stab10)
  misc_feature (20)..(20): Phosphorothioate or Phosphorodithioate 3'-Internucleotide Linkage (optionally present)
  misc_feature (1)..(19): ribonucleotide unmodified or modified as described for this sequence
gcccggcgccggcgaaaagtt

SEQ ID NO: 41 - DNA, 21 bp, Artificial Sequence
  Description of Artificial Sequence: Target Sequence/siNA antisense region (stab19)
  misc_feature (21)..(21): 3'-3 attached terminal deoxyabasic moiety, inverted abasic, inverted nucleotide or other terminal cap that is optionally present
  misc_feature (1)..(1): 2'-O-methyl
  misc_feature (2)..(4): 2'-deoxy-2'Fluoro
  misc_feature (5)..(6): 2'-O-methyl
  misc_feature (7)..(7): 2'-deoxy-2'Fluoro
  misc_feature (8)..(8): 2'-O-methyl
  misc_feature (9)..(10): 2'-deoxy-2'Fluoro
  misc_feature (11)..(12): 2'-O-methyl
  misc_feature (13)..(13): 2'-deoxy-2'Fluoro
  misc_feature (14)..(19): 2'-O-methyl
  misc_feature (1)..(19): ribonucleotide unmodified or modified as described for this sequence
gcccggcgccggcgaaaagtt

SEQ ID NO: 42 - DNA, 21 bp, Artificial Sequence
  Description of Artificial Sequence: Target Sequence/siNA antisense region (stab22)
  misc_feature (21)..(21): 3'-3 attached terminal deoxyabasic moiety, inverted abasic, inverted nucleotide or other terminal cap that is optionally present
  misc_feature (20)..(20): Phosphorothioate or Phosphorodithioate 3'-Internucleotide Linkage (optionally present)
  misc_feature (1)..(19): ribonucleotide unmodified or modified as described for this sequence
gcccggcgccggcgaaaagtt

SEQ ID NO: 43 - DNA, 21 bp, Artificial Sequence
  Description of Artificial Sequence: Target Sequence/siNA antisense region (stab25)
  misc_feature (4)..(4): 2'-deoxy-2'Fluoro
  misc_feature (5)..(6): 2'-O-methyl
  misc_feature (7)..(7): 2'-deoxy-2'Fluoro
  misc_feature (8)..(8): 2'-O-methyl
  misc_feature (9)..(10): 2'-deoxy-2'Fluoro
  misc_feature (11)..(12): 2'-O-methyl
  misc_feature (13)..(13): 2'-deoxy-2'Fluoro
  misc_feature (14)..(19): 2'-O-methyl
  misc_feature (20)..(20): Phosphorothioate or Phosphorodithioate 3'-Internucleotide Linkage (optionally present)
  misc_feature (1)..(19): ribonucleotide unmodified or modified as described for this sequence
gcccggcgccggcgaaaagtt

SEQ ID NO: 44 - RNA, 21 nt, Artificial Sequence
  Description of Artificial Sequence: Target Sequence/siNA antisense region (stab35)
  misc_feature (4)..(4): 2'-deoxy-2'Fluoro
  misc_feature (5)..(6): 2'-O-methyl
  misc_feature (7)..(7): 2'-deoxy-2'Fluoro
  misc_feature (8)..(8): 2'-O-methyl
  misc_feature (9)..(10): 2'-deoxy-2'Fluoro
  misc_feature (11)..(12): 2'-O-methyl
  misc_feature (13)..(13): 2'-deoxy-2'Fluoro
  misc_feature (14)..(21): 2'-O-methyl
gcccggcgccggcgaaaaguu

SEQ ID NO: 45 - RNA, 21 nt, Artificial Sequence
  Description of Artificial Sequence: Target Sequence/siNA antisense region (stab36)
  misc_feature (4)..(4): 2'-deoxy-2'Fluoro
  misc_feature (5)..(6): 2'-O-methyl
  misc_feature (7)..(7): 2'-deoxy-2'Fluoro
  misc_feature (8)..(8): 2'-O-methyl
  misc_feature (9)..(10): 2'-deoxy-2'Fluoro
  misc_feature (11)..(12): 2'-O-methyl
  misc_feature (13)..(13): 2'-deoxy-2'Fluoro
  misc_feature (14)..(21): 2'-O-methyl
gcccggcgccggcgaaaaguu

SEQ ID NO: 46 - RNA, 19 nt, Artificial Sequence
  Description of Artificial Sequence: Target Sequence/siNA sense region
ccgccucugaggccagggc

SEQ ID NO: 47 - RNA, 19 nt, Artificial Sequence
  Description of Artificial Sequence: Target Sequence/siNA antisense region
gcccuggccucagaggcgg

SEQ ID NO: 48 - DNA, 21 bp, Artificial Sequence
  Description of Artificial Sequence: Target Sequence/siNA sense region (stab00)
  misc_feature (1)..(19): ribonucleotide unmodified or modified as described for this sequence
ccgccucugaggccagggctt

SEQ ID NO: 49 - DNA, 21 bp, Artificial Sequence
  Description of Artificial Sequence: Target Sequence/siNA antisense region (stab00as)
  misc_feature (1)..(19): ribonucleotide unmodified or modified as described for this sequence
gcccuggccucagaggcggtt

SEQ ID NO: 50 - DNA, 21 bp, Artificial Sequence
  Description of Artificial Sequence: Target Sequence/siNA sense region (stab04)
  misc_feature (1)..(1): 5'-3 attached terminal deoxyabasic moiety, inverted abasic, inverted nucleotide or other terminal cap that is optionally present
  misc_feature (21)..(21): 3'-3 attached terminal deoxyabasic moiety, inverted abasic, inverted nucleotide or other terminal cap that is optionally present
  misc_feature (1)..(2): 2'-deoxy-2'Fluoro
  misc_feature (4)..(8): 2'-deoxy-2'Fluoro
  misc_feature (13)..(14): 2'-deoxy-2'Fluoro
  misc_feature (19)..(19): 2'-deoxy-2'Fluoro
  misc_feature (1)..(19): ribonucleotide unmodified or modified as described for this sequence
ccgccucugaggccagggctt

SEQ ID NO: 51 - DNA, 21 bp, Artificial Sequence
  Description of Artificial Sequence: Target Sequence/siNA antisense region (stab05)
  misc_feature (2)..(5): 2'-deoxy-2'Fluoro
  misc_feature (8)..(11): 2'-deoxy-2'Fluoro
  misc_feature (17)..(17): 2'-deoxy-2'Fluoro
  misc_feature (20)..(20): Phosphorothioate or Phosphorodithioate 3'-Internucleotide Linkage (optionally present)
  misc_feature (1)..(19): ribonucleotide unmodified or modified as described for this sequence
gcccuggccucagaggcggtt

SEQ ID NO: 52 - DNA, 21 bp, Artificial Sequence
  Description of Artificial Sequence: Target Sequence/siNA sense region (stab07)
  misc_feature (1)..(1): 5'-3 attached terminal deoxyabasic moiety, inverted abasic, inverted nucleotide or other terminal cap that is optionally present
  misc_feature (21)..(21): 3'-3 attached terminal deoxyabasic moiety, inverted abasic, inverted nucleotide or other terminal cap that is optionally present
  misc_feature (1)..(2): 2'-deoxy-2'Fluoro
  misc_feature (4)..(8): 2'-deoxy-2'Fluoro
  misc_feature (13)..(14): 2'-deoxy-2'Fluoro
  misc_feature (19)..(19): 2'-deoxy-2'Fluoro
  misc_feature (1)..(19): ribonucleotide unmodified or modified as described for this sequence
ccgccucugaggccagggctt

SEQ ID NO: 53 - DNA, 21 bp, Artificial Sequence
  Description of Artificial Sequence: Target Sequence/siNA antisense region (stab08)
  misc_feature (1)..(1): 2'-O-methyl
  misc_feature (2)..(5): 2'-deoxy-2'Fluoro
  misc_feature (6)..(7): 2'-O-methyl
  misc_feature (8)..(11): 2'-deoxy-2'Fluoro
  misc_feature (12)..(16): 2'-O-methyl
  misc_feature (17)..(17): 2'-deoxy-2'Fluoro
  misc_feature (18)..(19): 2'-O-methyl
  misc_feature (20)..(20): Phosphorothioate or Phosphorodithioate 3'-Internucleotide Linkage (optionally present)
  misc_feature (1)..(19): ribonucleotide unmodified or modified as described for this sequence
gcccuggccucagaggcggtt

SEQ ID NO: 54 - DNA, 21 bp, Artificial Sequence
  Description of Artificial Sequence: Target Sequence/siNA sense region (stab09)
  misc_feature (1)..(1): 5'-3 attached terminal deoxyabasic moiety, inverted abasic, inverted nucleotide or other terminal cap that is optionally present
  misc_feature (21)..(21): 3'-3 attached terminal deoxyabasic moiety, inverted abasic, inverted nucleotide or other terminal cap that is optionally present
  misc_feature (1)..(19): ribonucleotide unmodified or modified as described for this sequence
ccgccucugaggccagggctt

SEQ ID NO: 55 - DNA, 21 bp, Artificial Sequence
  Description of Artificial Sequence: Target Sequence/siNA antisense region (stab10)
  misc_feature (20)..(20): Phosphorothioate or Phosphorodithioate 3'-Internucleotide Linkage (optionally present)
  misc_feature (1)..(19): ribonucleotide unmodified or modified as described for this sequence
gcccuggccucagaggcggtt

SEQ ID NO: 56 - DNA, 21 bp, Artificial Sequence
  Description of Artificial Sequence: Target Sequence/siNA antisense region (stab19)
  misc_feature (21)..(21): 3'-3 attached terminal deoxyabasic moiety, inverted abasic, inverted nucleotide or other terminal cap that is optionally present
  misc_feature (1)..(1): 2'-O-methyl
  misc_feature (2)..(5): 2'-deoxy-2'Fluoro
  misc_feature (6)..(7): 2'-O-methyl
  misc_feature (8)..(11): 2'-deoxy-2'Fluoro
  misc_feature (12)..(16): 2'-O-methyl
  misc_feature (17)..(17): 2'-deoxy-2'Fluoro
  misc_feature (18)..(19): 2'-O-methyl
  misc_feature (1)..(19): ribonucleotide unmodified or modified as described for this sequence
gcccuggccucagaggcggtt

SEQ ID NO: 57 - DNA, 21 bp, Artificial Sequence
  Description of Artificial Sequence: Target Sequence/siNA antisense region (stab22)
  misc_feature (21)..(21): 3'-3 attached terminal deoxyabasic moiety, inverted abasic, inverted nucleotide or other terminal cap that is optionally present
  misc_feature (20)..(20): Phosphorothioate or Phosphorodithioate 3'-Internucleotide Linkage (optionally present)
  misc_feature (1)..(19): ribonucleotide unmodified or modified as described for this sequence
gcccuggccucagaggcggtt

SEQ ID NO: 58 - DNA, 21 bp, Artificial Sequence
  Description of Artificial Sequence: Target Sequence/siNA antisense region (stab25)
  misc_feature (4)..(5): 2'-deoxy-2'Fluoro
  misc_feature (6)..(7): 2'-O-methyl
  misc_feature (8)..(11): 2'-deoxy-2'Fluoro
  misc_feature (12)..(16): 2'-O-methyl
  misc_feature (17)..(17): 2'-deoxy-2'Fluoro
  misc_feature (18)..(19): 2'-O-methyl
  misc_feature (20)..(20): Phosphorothioate or Phosphorodithioate 3'-Internucleotide Linkage (optionally present)
  misc_feature (1)..(19): ribonucleotide unmodified or modified as described for this sequence
gcccuggccucagaggcggtt

SEQ ID NO: 59 - RNA, 21 nt, Artificial Sequence
  Description of Artificial Sequence: Target Sequence/siNA antisense region (stab35)
  misc_feature (4)..(5): 2'-deoxy-2'Fluoro
  misc_feature (6)..(7): 2'-O-methyl
  misc_feature (8)..(11): 2'-deoxy-2'Fluoro
  misc_feature (12)..(16): 2'-O-methyl
  misc_feature (17)..(17): 2'-deoxy-2'Fluoro
  misc_feature (18)..(21): 2'-O-methyl
gcccuggccucagaggcgguu

SEQ ID NO: 60 - RNA, 21 nt, Artificial Sequence
  Description of Artificial Sequence: Target Sequence/siNA antisense region (stab36)
  misc_feature (4)..(5): 2'-deoxy-2'Fluoro
  misc_feature (6)..(7): 2'-O-methyl
  misc_feature (8)..(11): 2'-deoxy-2'Fluoro
  misc_feature (12)..(16): 2'-O-methyl
  misc_feature (17)..(17): 2'-deoxy-2'Fluoro
  misc_feature (18)..(21): 2'-O-methyl
gcccuggccucagaggcggcc

SEQ ID NO: 61 - RNA, 19 nt, Artificial Sequence
  Description of Artificial Sequence: Target Sequence/siNA sense region
caggacacgaacgcgcgga

SEQ ID NO: 62 - RNA, 19 nt, Artificial Sequence
  Description of Artificial Sequence: Target Sequence/siNA antisense region
uccgcgcguucguguccug

SEQ ID NO: 63 - DNA, 21 bp, Artificial Sequence
  Description of Artificial Sequence: Target Sequence/siNA sense region (stab00)
  misc_feature (1)..(19): ribonucleotide unmodified or modified as described for this sequence
caggacacgaacgcgcggatt

SEQ ID NO: 64 - DNA, 21 bp, Artificial Sequence
  Description of Artificial Sequence: Target Sequence/siNA antisense region (stab00as)
  misc_feature (1)..(19): ribonucleotide unmodified or modified as described for this sequence
uccgcgcguucguguccugtt

SEQ ID NO: 65 - DNA, 21 bp, Artificial Sequence
  Description of Artificial Sequence: Target Sequence/siNA sense region (stab04)
  misc_feature (1)..(1): 5'-3 attached terminal deoxyabasic moiety, inverted abasic, inverted nucleotide or other terminal cap that is optionally present
  misc_feature (21)..(21): 3'-3 attached terminal deoxyabasic moiety, inverted abasic, inverted nucleotide or other terminal cap that is optionally present
  misc_feature (1)..(1): 2'-deoxy-2'Fluoro
  misc_feature (6)..(6): 2'-deoxy-2'Fluoro
  misc_feature (8)..(8): 2'-deoxy-2'Fluoro
  misc_feature (12)..(12): 2'-deoxy-2'Fluoro
  misc_feature (14)..(14): 2'-deoxy-2'Fluoro
  misc_feature (16)..(16): 2'-deoxy-2'Fluoro
  misc_feature (1). .(19): ribonucleotide unmodified or modified as described for this sequence
caggacacgaacgcgcggatt

SEQ ID NO: 66 - DNA, 21 bp, Artificial Sequence
  Description of Artificial Sequence: Target Sequence/siNA antisense region (stab05)
  misc_feature (1)..(3): 2'-deoxy-2'Fluoro
  misc_feature (5)..(5): 2'-deoxy-2'Fluoro
  misc_feature (7)..(7): 2'-deoxy-2'Fluoro
  misc_feature (9)..(11): 2'-deoxy-2'Fluoro
  misc_feature (13)..(13): 2'-deoxy-2'Fluoro
  misc_feature (15)..(18): 2'-deoxy-2'Fluoro
  misc_feature (20)..(20): Phosphorothioate or Phosphorodithioate 3'-Internucleotide Linkage (optionally present)
  misc_feature (1). .(19): ribonucleotide unmodified or modified as described for this sequence
uccgcgcguucguguccugtt

SEQ ID NO: 67 - DNA, 21 bp, Artificial Sequence
  Description of Artificial Sequence: Target Sequence/siNA sense region (stab07)
  misc_feature (1)..(1): 5'-3 attached terminal deoxyabasic moiety, inverted abasic, inverted nucleotide or other terminal cap that is optionally present
  misc_feature (21)..(21): 3'-3 attached terminal deoxyabasic moiety, inverted abasic, inverted nucleotide or other terminal cap that is optionally present
  misc_feature (1)..(1): 2'-deoxy-2'Fluoro
  misc_feature (6)..(6): 2'-deoxy-2'Fluoro
  misc_feature (8)..(8): 2'-deoxy-2'Fluoro
  misc_feature (12)..(12): 2'-deoxy-2'Fluoro
  misc_feature (14)..(14): 2'-deoxy-2'Fluoro
  misc_feature (16)..(16): 2'-deoxy-2'Fluoro
  misc_feature (1)..(19): ribonucleotide unmodified or modified as described for this sequence
caggacacgaacgcgcggatt

SEQ ID NO: 68 - DNA, 21 bp, Artificial Sequence
  Description of Artificial Sequence: Target Sequence/siNA antisense region (stab08)
  misc_feature (1)..(3): 2'-deoxy-2'Fluoro
  misc_feature (4)..(4): 2'-O-methyl
  misc_feature (5)..(5): 2'-deoxy-2'Fluoro
  misc_feature (6)..(6): 2'-O-methyl
  misc_feature (7)..(7): 2'-deoxy-2'Fluoro
  misc_feature (8)..(8): 2'-O-methyl
  misc_feature (9)..(11): 2'-deoxy-2'Fluoro
  misc_feature (12)..(12): 2'-O-methyl
  misc_feature (13)..(13): 2'-deoxy-2'Fluoro
  misc_feature (14)..(14): 2'-O-methyl
  misc_feature (15)..(18): 2'-deoxy-2'Fluoro
  misc_feature (19)..(19): 2'-O-methyl
  misc_feature (20)..(20): Phosphorothioate or Phosphorodithioate 3'-Internucleotide Linkage (optionally present)
  misc_feature (1)..(19): ribonucleotide unmodified or modified as described for this sequence
uccgcgcguucguguccugtt

SEQ ID NO: 69 - DNA, 21 bp, Artificial Sequence
  Description of Artificial Sequence: Target Sequence/siNA sense region (stab09)
  misc_feature (1)..(1): 5'-3 attached terminal deoxyabasic moiety, inverted abasic, inverted nucleotide or other terminal cap that is optionally present
  misc_feature (21)..(21): 3'-3 attached terminal deoxyabasic moiety, inverted abasic, inverted nucleotide or other terminal cap that is optionally present
  misc_feature (1)..(19): ribonucleotide unmodified or modified as described for this sequence
caggacacgaacgcgcggatt

SEQ ID NO: 70 - DNA, 21 bp, Artificial Sequence
  Description of Artificial Sequence: Target Sequence/siNA antisense region (stab10)
  misc_feature (20)..(20): Phosphorothioate or Phosphorodithioate 3'-Internucleotide Linkage (optionally present)
  misc_feature (1)..(19): ribonucleotide unmodified or modified as described for this sequence
uccgcgcguucguguccugtt

SEQ ID NO: 71 - DNA, 21 bp, Artificial Sequence
  Description of Artificial Sequence: Target Sequence/siNA antisense region (stab19)
  misc_feature (21)..(21): 3'-3 attached terminal deoxyabasic moiety, inverted abasic, inverted nucleotide or other terminal cap that is optionally present
  misc_feature (1)..(3): 2'-deoxy-2'Fluoro
  misc_feature (4)..(4): 2'-O-methyl
  misc_feature (5)..(5): 2'-deoxy-2'Fluoro
  misc_feature (6)..(6): 2'-O-methyl
  misc_feature (7)..(7): 2'-deoxy-2'Fluoro
  misc_feature (8)..(8): 2'-O-methyl
  misc_feature (9)..(11): 2'-deoxy-2'Fluoro
  misc_feature (12)..(12): 2'-O-methyl
  misc_feature (13)..(13): 2'-deoxy-2'Fluoro
  misc_feature (14)..(14): 2'-O-methyl
  misc_feature (15)..(18): 2'-deoxy-2'Fluoro
  misc_feature (19)..(19): 2'-O-methyl
  misc_feature (1)..(19): ribonucleotide unmodified or modified as described for this sequence
uccgcgcguucguguccugtt

SEQ ID NO: 72 - DNA, 21 bp, Artificial Sequence
  Description of Artificial Sequence: Target Sequence/siNA antisense region (stab22)
  misc_feature (21)..(21): 3'-3 attached terminal deoxyabasic moiety, inverted abasic, inverted nucleotide or other terminal cap that is optionally present
  misc_feature (20)..(20): Phosphorothioate or Phosphorodithioate 3'-Internucleotide Linkage (optionally present)
  misc_feature (1)..(19): ribonucleotide unmodified or modified as described for this sequence
uccgcgcguucguguccugtt

SEQ ID NO: 73 - DNA, 21 bp, Artificial Sequence
  Description of Artificial Sequence: Target Sequence/siNA antisense region (stab25)
  misc_feature (4)..(4): 2'-O-methyl
  misc_feature (5)..(5): 2'-deoxy-2'Fluoro
  misc_feature (6)..(6): 2'-O-methyl
  misc_feature (7)..(7): 2'-deoxy-2'Fluoro
  misc_feature (8)..(8): 2'-O-methyl
  misc_feature (9)..(11): 2'-deoxy-2'Fluoro
  misc_feature (12)..(12): 2'-O-methyl
  misc_feature (13)..(13): 2'-deoxy-2'Fluoro
  misc_feature (14)..(14): 2'-O-methyl
  misc_feature (15)..(18): 2'-deoxy-2'Fluoro
  misc_feature (19)..(19): 2'-O-methyl
  misc_feature (20)..(20): Phosphorothioate or Phosphorodithioate 3'-Internucleotide Linkage (optionally present)
  misc_feature (1)..(19): ribonucleotide unmodified or modified as described for this sequence
uccgcgcguucguguccugtt

SEQ ID NO: 74 - RNA, 21 nt, Artificial Sequence
  Description of Artificial Sequence: Target Sequence/siNA antisense region (stab35)
  misc_feature (4)..(4): 2'-O-methyl
  misc_feature (5)..(5): 2'-deoxy-2'Fluoro
  misc_feature (6)..(6): 2'-O-methyl
  misc_feature (7)..(7): 2'-deoxy-2'Fluoro
  misc_feature (8)..(8): 2'-O-methyl
  misc_feature (9)..(11): 2'-deoxy-2'Fluoro
  misc_feature (12)..(12): 2'-O-methyl
  misc_feature (13)..(13): 2'-deoxy-2'Fluoro
  misc_feature (14)..(14): 2'-O-methyl
  misc_feature (15)..(18): 2'-deoxy-2'Fluoro
  misc_feature (19)..(21): 2'-O-methyl
uccgcgcguucguguccuguu

SEQ ID NO: 75 - RNA, 21 nt, Artificial Sequence
  Description of Artificial Sequence: Target Sequence/siNA antisense region (stab36)
  misc_feature (4)..(4): 2'-O-methyl
  misc_feature (5)..(5): 2'-deoxy-2'Fluoro
  misc_feature (6)..(6): 2'-O-methyl
  misc_feature (7)..(7): 2'-deoxy-2'Fluoro
  misc_feature (8)..(8): 2'-O-methyl
  misc_feature (9)..(11): 2'-deoxy-2'Fluoro
  misc_feature (12)..(12): 2'-O-methyl
  misc_feature (13)..(13): 2'-deoxy-2'Fluoro
  misc_feature (14)..(14): 2'-O-methyl
  misc_feature (15)..(18): 2'-deoxy-2'Fluoro
  misc_feature (19)..(21): 2'-O-methyl
uccgcgcguucguguccugcc

SEQ ID NO: 76 - RNA, 19 nt, Artificial Sequence
  Description of Artificial Sequence: Target Sequence/siNA sense region
agcggcggcggcgacugag

SEQ ID NO: 77 - RNA, 19 nt, Artificial Sequence
  Description of Artificial Sequence: Target Sequence/siNA antisense region
cucagucgccgccgccgcu

SEQ ID NO: 78 - DNA, 21 bp, Artificial Sequence
  Description of Artificial Sequence: Target Sequence/siNA sense region (stab00)
  misc_feature (1)..(19): ribonucleotide unmodified or modified as described for this sequence
agcggcggcggcgacugagtt

SEQ ID NO: 79 - DNA, 21 bp, Artificial Sequence
  Description of Artificial Sequence: Target Sequence/siNA antisense region (stab00as)
  misc_feature (1)..(19): ribonucleotide unmodified or modified as described for this sequence
cucagucgccgccgccgcutt

SEQ ID NO: 80 - DNA, 21 bp, Artificial Sequence
  Description of Artificial Sequence: Target Sequence/siNA sense region (stab04)
  misc_feature (1)..(1): 5'-3 attached terminal deoxyabasic moiety, inverted abasic, inverted nucleotide or other terminal cap that is optionally present
  misc_feature (21)..(21): 3'-3 attached terminal deoxyabasic moiety, inverted abasic, inverted nucleotide or other terminal cap that is optionally present
  misc_feature (3)..(3): 2'-deoxy-2'Fluoro
  misc_feature (6)..(6): 2'-deoxy-2'Fluoro
  misc_feature (9)..(9): 2'-deoxy-2'Fluoro
  misc_feature (12)..(12): 2'-deoxy-2'Fluoro
  misc_feature (15)..(16): 2'-deoxy-2'Fluoro
  misc_feature (1). .(19): ribonucleotide unmodified or modified as described for this sequence
agcggcggcggcgacugagtt

SEQ ID NO: 81 - DNA, 21 bp, Artificial Sequence
  Description of Artificial Sequence: Target Sequence/siNA antisense region (stab05)
  misc_feature (1)..(3): 2'-deoxy-2'Fluoro
  misc_feature (6)..(7): 2'-deoxy-2'Fluoro
  misc_feature (9)..(10): 2'-deoxy-2'Fluoro
  misc_feature (12)..(13): 2'-deoxy-2'Fluoro
  misc_feature (15)..(16): 2'-deoxy-2'Fluoro
  misc_feature (18)..(19): 2'-deoxy-2'Fluoro
  misc_feature (20)..(20): Phosphorothioate or Phosphorodithioate 3'-Internucleotide Linkage (optionally present)
  misc_feature (1). .(19): ribonucleotide unmodified or modified as described for this sequence
cucagucgccgccgccgcutt

SEQ ID NO: 82 - DNA, 21 bp, Artificial Sequence
  Description of Artificial Sequence: Target Sequence/siNA sense region (stab07)
  misc_feature (1)..(1): 5'-3 attached terminal deoxyabasic moiety, inverted abasic, inverted nucleotide or other terminal cap that is optionally present
  misc_feature (21)..(21): 3'-3 attached terminal deoxyabasic moiety, inverted abasic, inverted nucleotide or other terminal cap that is optionally present
  misc_feature (3)..(3): 2'-deoxy-2'Fluoro
  misc_feature (6)..(6): 2'-deoxy-2'Fluoro
  misc_feature (9)..(9): 2'-deoxy-2'Fluoro
  misc_feature (12)..(12): 2'-deoxy-2'Fluoro
  misc_feature (15)..(16): 2'-deoxy-2'Fluoro
  misc_feature (1)..(19): ribonucleotide unmodified or modified as described for this sequence
agcggcggcggcgacugagtt

SEQ ID NO: 83 - DNA, 21 bp, Artificial Sequence
  Description of Artificial Sequence: Target Sequence/siNA antisense region (stab08)
  misc_feature (1)..(3): 2'-deoxy-2'Fluoro
  misc_feature (4)..(5): 2'-O-methyl
  misc_feature (6)..(7): 2'-deoxy-2'Fluoro
  misc_feature (8)..(8): 2'-O-methyl
  misc_feature (9)..(10): 2'-deoxy-2'Fluoro
  misc_feature (11)..(11): 2'-O-methyl
  misc_feature (12)..(13): 2'-deoxy-2'Fluoro
  misc_feature (14)..(14): 2'-O-methyl
  misc_feature (15)..(16): 2'-deoxy-2'Fluoro
  misc_feature (17)..(17): 2'-O-methyl
  misc_feature (18)..(19): 2'-deoxy-2'Fluoro
  misc_feature (20)..(20): Phosphorothioate or Phosphorodithioate 3'-Internucleotide Linkage (optionally present)
  misc_feature (1)..(19): ribonucleotide unmodified or modified as described for this sequence
cucagucgccgccgccgcutt

SEQ ID NO: 84 - DNA, 21 bp, Artificial Sequence
  Description of Artificial Sequence: Target Sequence/siNA sense region (stab09)
  misc_feature (1)..(1): 5'-3 attached terminal deoxyabasic moiety, inverted abasic, inverted nucleotide or other terminal cap that is optionally present
  misc_feature (21)..(21): 3'-3 attached terminal deoxyabasic moiety, inverted abasic, inverted nucleotide or other terminal cap that is optionally present
  misc_feature (1)..(19): ribonucleotide unmodified or modified as described for this sequence
agcggcggcggcgacugagtt

SEQ ID NO: 85 - DNA, 21 bp, Artificial Sequence
  Description of Artificial Sequence: Target Sequence/siNA antisense region (stab10)
  misc_feature (20)..(20): Phosphorothioate or Phosphorodithioate 3'-Internucleotide Linkage (optionally present)
  misc_feature (1)..(19): ribonucleotide unmodified or modified as described for this sequence
cucagucgccgccgccgcutt

SEQ ID NO: 86 - DNA, 21 bp, Artificial Sequence
  Description of Artificial Sequence: Target Sequence/siNA antisense region (stab19)
  misc_feature (21)..(21): 3'-3 attached terminal deoxyabasic moiety, inverted abasic, inverted nucleotide or other terminal cap that is optionally present
  misc_feature (1)..(3): 2'-deoxy-2'Fluoro
  misc_feature (4)..(5): 2'-O-methyl
  misc_feature (6)..(7): 2'-deoxy-2'Fluoro
  misc_feature (8)..(8): 2'-O-methyl
  misc_feature (9)..(10): 2'-deoxy-2'Fluoro
  misc_feature (11)..(11): 2'-O-methyl
  misc_feature (12)..(13): 2'-deoxy-2'Fluoro
  misc_feature (14)..(14): 2'-O-methyl
  misc_feature (15)..(16): 2'-deoxy-2'Fluoro
  misc_feature (17)..(17): 2'-O-methyl
  misc_feature (18)..(19): 2'-deoxy-2'Fluoro
  misc_feature (1)..(19): ribonucleotide unmodified or modified as described for this sequence
cucagucgccgccgccgcutt

SEQ ID NO: 87 - DNA, 21 bp, Artificial Sequence
  Description of Artificial Sequence: Target Sequence/siNA antisense region (stab22)
  misc_feature (21)..(21): 3'-3 attached terminal deoxyabasic moiety, inverted abasic, inverted nucleotide or other terminal cap that is optionally present
  misc_feature (20)..(20): Phosphorothioate or Phosphorodithioate 3'-Internucleotide Linkage (optionally present)
  misc_feature (1)..(19): ribonucleotide unmodified or modified as described for this sequence
cucagucgccgccgccgcutt

SEQ ID NO: 88 - DNA, 21 bp, Artificial Sequence
  Description of Artificial Sequence: Target Sequence/siNA antisense region (stab25)
  misc_feature (4)..(5): 2'-O-methyl
  misc_feature (6)..(7): 2'-deoxy-2'Fluoro
  misc_feature (8)..(8): 2'-O-methyl
  misc_feature (9)..(10): 2'-deoxy-2'Fluoro
  misc_feature (11)..(11): 2'-O-methyl
  misc_feature (12)..(13): 2'-deoxy-2'Fluoro
  misc_feature (14)..(14): 2'-O-methyl
  misc_feature (15)..(16): 2'-deoxy-2'Fluoro
  misc_feature (17)..(17): 2'-O-methyl
  misc_feature (18)..(19): 2'-deoxy-2'Fluoro
  misc_feature (20)..(20): Phosphorothioate or Phosphorodithioate 3'-Internucleotide Linkage (optionally present)
  misc_feature (1). .(19): ribonucleotide unmodified or modified as described for this sequence
cucagucgccgccgccgcutt

SEQ ID NO: 89 - RNA, 21 nt, Artificial Sequence
  Description of Artificial Sequence: Target Sequence/siNA antisense region (stab35)
  misc_feature (4)..(5): 2'-O-methyl
  misc_feature (6)..(7): 2'-deoxy-2'Fluoro
  misc_feature (8)..(8): 2'-O-methyl
  misc_feature (9)..(10): 2'-deoxy-2'Fluoro
  misc_feature (11)..(11): 2'-O-methyl
  misc_feature (12)..(13): 2'-deoxy-2'Fluoro
  misc_feature (14)..(14): 2'-O-methyl
  misc_feature (15)..(16): 2'-deoxy-2'Fluoro
  misc_feature (17)..(17): 2'-O-methyl
  misc_feature (18)..(19): 2'-deoxy-2'Fluoro
  misc_feature (20)..(21): 2'-O-methyl
cucagucgccgccgccgcuuu

SEQ ID NO: 90 - RNA, 21 nt, Artificial Sequence
  Description of Artificial Sequence: Target Sequence/siNA antisense region (stab36)
  misc_feature (4)..(5): 2'-O-methyl
  misc_feature (6)..(7): 2'-deoxy-2'Fluoro
  misc_feature (8)..(8): 2'-O-methyl
  misc_feature (9)..(10): 2'-deoxy-2'Fluoro
  misc_feature (11)..(11): 2'-O-methyl
  misc_feature (12)..(13): 2'-deoxy-2'Fluoro
  misc_feature (14)..(14): 2'-O-methyl
  misc_feature (15)..(16): 2'-deoxy-2'Fluoro
  misc_feature (17)..(17): 2'-O-methyl
  misc_feature (18)..(19): 2'-deoxy-2'Fluoro
  misc_feature (20)..(21): 2'-O-methyl
cucagucgccgccgccgcucc

SEQ ID NO: 91 - RNA, 19 nt, Artificial Sequence
  Description of Artificial Sequence: Target Sequence/siNA sense region
gagccggggccgcggcggc

SEQ ID NO: 92 - RNA, 19 nt, Artificial Sequence
  Description of Artificial Sequence: Target Sequence/siNA antisense region
gccgccgcggccccggcuc

SEQ ID NO: 93 - DNA, 21 bp, Artificial Sequence
  Description of Artificial Sequence: Target Sequence/siNA sense region (stab00)
  misc_feature (1)..(19): ribonucleotide unmodified or modified as described for this sequence
gagccggggccgcggcggctt

SEQ ID NO: 94 - DNA, 21 bp, Artificial Sequence
  Description of Artificial Sequence: Target Sequence/siNA antisense region (stab00as)
  misc_feature (1)..(19): ribonucleotide unmodified or modified as described for this sequence
gccgccgcggccccggcuctt

SEQ ID NO: 95 - DNA, 21 bp, Artificial Sequence
  Description of Artificial Sequence: Target Sequence/siNA sense region (stab04)
  misc_feature (1)..(1): 5'-3 attached terminal deoxyabasic moiety, inverted abasic, inverted nucleotide or other terminal cap that is optionally present
  misc_feature (21)..(21): 3'-3 attached terminal deoxyabasic moiety, inverted abasic, inverted nucleotide or other terminal cap that is optionally present
  misc_feature (4)..(5): 2'-deoxy-2'Fluoro
  misc_feature (10)..(11): 2'-deoxy-2'Fluoro
  misc_feature (13)..(13): 2'-deoxy-2'Fluoro
  misc_feature (16)..(16): 2'-deoxy-2'Fluoro
  misc_feature (19)..(19): 2'-deoxy-2'Fluoro
  misc_feature (1). .(19): ribonucleotide unmodified or modified as described for this sequence
gagccggggccgcggcggctt

SEQ ID NO: 96 - DNA, 21 bp, Artificial Sequence
  Description of Artificial Sequence: Target Sequence/siNA antisense region (stab05)
  misc_feature (2)..(3): 2'-deoxy-2'Fluoro
  misc_feature (5)..(6): 2'-deoxy-2'Fluoro
  misc_feature (8)..(8): 2'-deoxy-2'Fluoro
  misc_feature (11)..(14): 2'-deoxy-2'Fluoro
  misc_feature (17)..(19): 2'-deoxy-2'Fluoro
  misc_feature (20)..(20): Phosphorothioate or Phosphorodithioate 3'-Internucleotide Linkage (optionally present)
  misc_feature (1). .(19): ribonucleotide unmodified or modified as described for this sequence
gccgccgcggccccggcuctt

SEQ ID NO: 97 - DNA, 21 bp, Artificial Sequence
  Description of Artificial Sequence: Target Sequence/siNA sense region (stab07)
  misc_feature (1)..(1): 5'-3 attached terminal deoxyabasic moiety, inverted abasic, inverted nucleotide or other terminal cap that is optionally present
  misc_feature (21)..(21): 3'-3 attached terminal deoxyabasic moiety, inverted abasic, inverted nucleotide or other terminal cap that is optionally present
  misc_feature (4)..(5): 2'-deoxy-2'Fluoro
  misc_feature (10)..(11): 2'-deoxy-2'Fluoro
  misc_feature (13)..(13): 2'-deoxy-2'Fluoro
  misc_feature (16)..(16): 2'-deoxy-2'Fluoro
  misc_feature (19)..(19): 2'-deoxy-2'Fluoro
  misc_feature (1)..(19): ribonucleotide unmodified or modified as described for this sequence
gagccggggccgcggcggctt

SEQ ID NO: 98 - DNA, 21 bp, Artificial Sequence
  Description of Artificial Sequence: Target Sequence/siNA antisense region (stab08)
  misc_feature (1)..(1): 2'-O-methyl
  misc_feature (2)..(3): 2'-deoxy-2'Fluoro
  misc_feature (4)..(4): 2'-O-methyl
  misc_feature (5)..(6): 2'-deoxy-2'Fluoro
  misc_feature (7)..(7): 2'-O-methyl
  misc_feature (8)..(8): 2'-deoxy-2'Fluoro
  misc_feature (9)..(10): 2'-O-methyl
  misc_feature (11)..(14): 2'-deoxy-2'Fluoro
  misc_feature (15)..(16): 2'-O-methyl
  misc_feature (17)..(19): 2'-deoxy-2'Fluoro
  misc_feature (20)..(20): Phosphorothioate or Phosphorodithioate 3'-Internucleotide Linkage (optionally present)
  misc_feature (1)..(19): ribonucleotide unmodified or modified as described for this sequence
gccgccgcggccccggcuctt

SEQ ID NO: 99 - DNA, 21 bp, Artificial Sequence
  Description of Artificial Sequence: Target Sequence/siNA sense region (stab09)
  misc_feature (1)..(1): 5'-3 attached terminal deoxyabasic moiety, inverted abasic, inverted nucleotide or other terminal cap that is optionally present
  misc_feature (21)..(21): 3'-3 attached terminal deoxyabasic moiety, inverted abasic, inverted nucleotide or other terminal cap that is optionally present
  misc_feature (1)..(19): ribonucleotide unmodified or modified as described for this sequence
gagccggggccgcggcggctt

SEQ ID NO: 100 - DNA, 21 bp, Artificial Sequence
  Description of Artificial Sequence: Target Sequence/siNA antisense region (stab10)
  misc_feature (20)..(20): Phosphorothioate or Phosphorodithioate 3'-Internucleotide Linkage (optionally present)
  misc_feature (1)..(19): ribonucleotide unmodified or modified as described for this sequence
gccgccgcggccccggcuctt

SEQ ID NO: 101 - DNA, 21 bp, Artificial Sequence
  Description of Artificial Sequence: Target Sequence/siNA antisense region (stab19)
  misc_feature (21)..(21): 3'-3 attached terminal deoxyabasic moiety, inverted abasic, inverted nucleotide or other terminal cap that is optionally present
  misc_feature (1)..(1): 2'-O-methyl
  misc_feature (2)..(3): 2'-deoxy-2'Fluoro
  misc_feature (4)..(4): 2'-O-methyl
  misc_feature (5)..(6): 2'-deoxy-2'Fluoro
  misc_feature (7)..(7): 2'-O-methyl
  misc_feature (8)..(8): 2'-deoxy-2'Fluoro
  misc_feature (9)..(10): 2'-O-methyl
  misc_feature (11)..(14): 2'-deoxy-2'Fluoro
  misc_feature (15)..(16): 2'-O-methyl
  misc_feature (17)..(19): 2'-deoxy-2'Fluoro
  misc_feature (1)..(19): ribonucleotide unmodified or modified as described for this sequence
gccgccgcggccccggcuctt

SEQ ID NO: 102 - DNA, 21 bp, Artificial Sequence
  Description of Artificial Sequence: Target Sequence/siNA antisense region (stab22)
  misc_feature (21)..(21): 3'-3 attached terminal deoxyabasic moiety, inverted abasic, inverted nucleotide or other terminal cap that is optionally present
  misc_feature (20)..(20): Phosphorothioate or Phosphorodithioate 3'-Internucleotide Linkage (optionally present)
  misc_feature (1)..(19): ribonucleotide unmodified or modified as described for this sequence
gccgccgcggccccggcuctt

SEQ ID NO: 103 - DNA, 21 bp, Artificial Sequence
  Description of Artificial Sequence: Target Sequence/siNA antisense region (stab25)
  misc_feature (4)..(4): 2'-O-methyl
  misc_feature (5)..(6): 2'-deoxy-2'Fluoro
  misc_feature (7)..(7): 2'-O-methyl
  misc_feature (8)..(8): 2'-deoxy-2'Fluoro
  misc_feature (9)..(10): 2'-O-methyl
  misc_feature (11)..(14): 2'-deoxy-2'Fluoro
  misc_feature (15)..(16): 2'-O-methyl
  misc_feature (17)..(19): 2'-deoxy-2'Fluoro
  misc_feature (20)..(20): Phosphorothioate or Phosphorodithioate 3'-Internucleotide Linkage (optionally present)
  misc_feature (1). .(19): ribonucleotide unmodified or modified as described for this sequence
gccgccgcggccccggcuctt

SEQ ID NO: 104 - RNA, 21 nt, Artificial Sequence
  Description of Artificial Sequence: Target Sequence/siNA antisense region (stab35)
  misc_feature (4)..(4): 2'-O-methyl
  misc_feature (5)..(6): 2'-deoxy-2'Fluoro
  misc_feature (7)..(7): 2'-O-methyl
  misc_feature (8)..(8): 2'-deoxy-2'Fluoro
  misc_feature (9)..(10): 2'-O-methyl
  misc_feature (11)..(14): 2'-deoxy-2'Fluoro
  misc_feature (15)..(16): 2'-O-methyl
  misc_feature (17)..(19): 2'-deoxy-2'Fluoro
  misc_feature (20)..(21): 2'-O-methyl
gccgccgcggccccggcucuu

SEQ ID NO: 105 - RNA, 21 nt, Artificial Sequence
  Description of Artificial Sequence: Target Sequence/siNA antisense region (stab36)
  misc_feature (4)..(4): 2'-O-methyl
  misc_feature (5)..(6): 2'-deoxy-2'Fluoro
  misc_feature (7)..(7): 2'-O-methyl
  misc_feature (8)..(8): 2'-deoxy-2'Fluoro
  misc_feature (9)..(10): 2'-O-methyl
  misc_feature (11)..(14): 2'-deoxy-2'Fluoro
  misc_feature (15)..(16): 2'-O-methyl
  misc_feature (17)..(19): 2'-deoxy-2'Fluoro
  misc_feature (20)..(21): 2'-O-methyl
gccgccgcggccccggcucuc

SEQ ID NO: 106 - RNA, 19 nt, Artificial Sequence
  Description of Artificial Sequence: Target Sequence/siNA sense region
cgcucccuaggaagggccg

SEQ ID NO: 107 - RNA, 19 nt, Artificial Sequence
  Description of Artificial Sequence: Target Sequence/siNA antisense region
cggcccuuccuagggagcg

SEQ ID NO: 108 - DNA, 21 bp, Artificial Sequence
  Description of Artificial Sequence: Target Sequence/siNA sense region (stab00)
  misc_feature (1)..(19): ribonucleotide unmodified or modified as described for this sequence
cgcucccuaggaagggccgtt

SEQ ID NO: 109 - DNA, 21 bp, Artificial Sequence
  Description of Artificial Sequence: Target Sequence/siNA antisense region (stab00as)
  misc_feature (1)..(19): ribonucleotide unmodified or modified as described for this sequence
cggcccuuccuagggagcgtt

SEQ ID NO: 110 - DNA, 21 bp, Artificial Sequence
  Description of Artificial Sequence: Target Sequence/siNA sense region (stab04)
  misc_feature (1)..(1): 5'-3 attached terminal deoxyabasic moiety, inverted abasic, inverted nucleotide or other terminal cap that is optionally present
  misc_feature (21)..(21): 3'-3 attached terminal deoxyabasic moiety, inverted abasic, inverted nucleotide or other terminal cap that is optionally present
  misc_feature (1)..(1): 2'-deoxy-2'Fluoro
  misc_feature (3)..(8): 2'-deoxy-2'Fluoro
  misc_feature (17)..(18): 2'-deoxy-2'Fluoro
  misc_feature (1). .(19): ribonucleotide unmodified or modified as described for this sequence
cgcucccuaggaagggccgtt

SEQ ID NO: 111 - DNA, 21 bp, Artificial Sequence
  Description of Artificial Sequence: Target Sequence/siNA antisense region (stab05)
  misc_feature (1)..(1): 2'-deoxy-2'Fluoro
  misc_feature (4)..(11): 2'-deoxy-2'Fluoro
  misc_feature (18)..(18): 2'-deoxy-2'Fluoro
  misc_feature (20)..(20): Phosphorothioate or Phosphorodithioate 3'-Internucleotide Linkage (optionally present)
  misc_feature (1). .(19): ribonucleotide unmodified or modified as described for this sequence
cggcccuuccuagggagcgtt

SEQ ID NO: 112 - DNA, 21 bp, Artificial Sequence
  Description of Artificial Sequence: Target Sequence/siNA sense region (stab07)
  misc_feature (1)..(1): 5'-3 attached terminal deoxyabasic moiety, inverted abasic, inverted nucleotide or other terminal cap that is optionally present
  misc_feature (21)..(21): 3'-3 attached terminal deoxyabasic moiety, inverted abasic, inverted nucleotide or other terminal cap that is optionally present
  misc_feature (1)..(1): 2'-deoxy-2'Fluoro
  misc_feature (3)..(8): 2'-deoxy-2'Fluoro
  misc_feature (17)..(18): 2'-deoxy-2'Fluoro
cgcucccuaggaagggccgtt

SEQ ID NO: 113 - DNA, 21 bp, Artificial Sequence
  Description of Artificial Sequence: Target Sequence/siNA antisense region (stab08)
  misc_feature (1)..(1): 2'-deoxy-2'Fluoro
  misc_feature (2)..(3): 2'-O-methyl
  misc_feature (4)..(11): 2'-deoxy-2'Fluoro
  misc_feature (12)..(17): 2'-O-methyl
  misc_feature (18)..(18): 2'-deoxy-2'Fluoro
  misc_feature (19)..(19): 2'-O-methyl
  misc_feature (20)..(20): Phosphorothioate or Phosphorodithioate 3'-Internucleotide Linkage (optionally present)
  misc_feature (1)..(19): ribonucleotide unmodified or modified as described for this sequence
cggcccuuccuagggagcgtt

SEQ ID NO: 114 - DNA, 21 bp, Artificial Sequence
  Description of Artificial Sequence: Target Sequence/siNA sense region (stab09)
  misc_feature (1)..(1): 5'-3 attached terminal deoxyabasic moiety, inverted abasic, inverted nucleotide or other terminal cap that is optionally present
  misc_feature (21)..(21): 3'-3 attached terminal deoxyabasic moiety, inverted abasic, inverted nucleotide or other terminal cap that is optionally present
  misc_feature (1)..(19): ribonucleotide unmodified or modified as described for this sequence
cgcucccuaggaagggccgtt

SEQ ID NO: 115 - DNA, 21 bp, Artificial Sequence
  Description of Artificial Sequence: Target Sequence/siNA antisense region (stab10)
  misc_feature (20)..(20): Phosphorothioate or Phosphorodithioate 3'-Internucleotide Linkage (optionally present)
  misc_feature (1)..(19): ribonucleotide unmodified or modified as described for this sequence
cggcccuuccuagggagcgtt

SEQ ID NO: 116 - DNA, 21 bp, Artificial Sequence
  Description of Artificial Sequence: Target Sequence/siNA antisense region (stab19)
  misc_feature (21)..(21): 3'-3 attached terminal deoxyabasic moiety, inverted abasic, inverted nucleotide or other terminal cap that is optionally present
  misc_feature (1)..(1): 2'-deoxy-2'Fluoro
  misc_feature (2)..(3): 2'-O-methyl
  misc_feature (4)..(11): 2'-deoxy-2'Fluoro
  misc_feature (12)..(17): 2'-O-methyl
  misc_feature (18)..(18): 2'-deoxy-2'Fluoro
  misc_feature (19)..(19): 2'-O-methyl
  misc_feature (1)..(19): ribonucleotide unmodified or modified as described for this sequence
cggcccuuccuagggagcgtt

SEQ ID NO: 117 - DNA, 21 bp, Artificial Sequence
  Description of Artificial Sequence: Target Sequence/siNA antisense region (stab22)
  misc_feature (21)..(21): 3'-3 attached terminal deoxyabasic moiety, inverted abasic, inverted nucleotide or other terminal cap that is optionally present
  misc_feature (20)..(20): Phosphorothioate or Phosphorodithioate 3'-Internucleotide Linkage (optionally present)
  misc_feature (1)..(19): ribonucleotide unmodified or modified as described for this sequence
cggcccuuccuagggagcgtt

SEQ ID NO: 118 - DNA, 21 bp, Artificial Sequence
  Description of Artificial Sequence: Target Sequence/siNA antisense region (stab25)
  misc_feature (4)..(11): 2'-deoxy-2'Fluoro
  misc_feature (12)..(17): 2'-O-methyl
  misc_feature (18)..(18): 2'-deoxy-2'Fluoro
  misc_feature (19)..(19): 2'-O-methyl
  misc_feature (20)..(20): Phosphorothioate or Phosphorodithioate 3'-Internucleotide Linkage (optionally present)
  misc_feature (1). .(19): ribonucleotide unmodified or modified as described for this sequence
cggcccuuccuagggagcgtt

SEQ ID NO: 119 - RNA, 21 nt, Artificial Sequence
  Description of Artificial Sequence: Target Sequence/siNA antisense region (stab35)
  misc_feature (4)..(11): 2'-deoxy-2'Fluoro
  misc_feature (12)..(17): 2'-O-methyl
  misc_feature (18)..(18): 2'-deoxy-2'Fluoro
  misc_feature (19)..(21): 2'-O-methyl
cggcccuuccuagggagcguu

SEQ ID NO: 120 - RNA, 21 nt, Artificial Sequence
  Description of Artificial Sequence: Target Sequence/siNA antisense region (stab36)
  misc_feature (4)..(11): 2'-deoxy-2'Fluoro
  misc_feature (12)..(17): 2'-O-methyl
  misc_feature (18)..(18): 2'-deoxy-2'Fluoro
  misc_feature (19)..(21): 2'-O-methyl
cggcccuuccuagggagcgcc

SEQ ID NO: 121 - RNA, 19 nt, Artificial Sequence
  Description of Artificial Sequence: Target Sequence/siNA sense region
guacgaggcggcgggcccg

SEQ ID NO: 122 - RNA, 19 nt, Artificial Sequence
  Description of Artificial Sequence: Target Sequence/siNA antisense region
cgggcccgccgccucguac

SEQ ID NO: 123 - DNA, 21 bp, Artificial Sequence
  Description of Artificial Sequence: Target Sequence/siNA sense region (stab00)
  misc_feature (1)..(19): ribonucleotide unmodified or modified as described for this sequence
guacgaggcggcgggcccgtt

SEQ ID NO: 124 - DNA, 21 bp, Artificial Sequence
  Description of Artificial Sequence: Target Sequence/siNA antisense region (stab00as)
  misc_feature (1)..(19): ribonucleotide unmodified or modified as described for this sequence
cgggcccgccgccucguactt

SEQ ID NO: 125 - DNA, 21 bp, Artificial Sequence
  Description of Artificial Sequence: Target Sequence/siNA sense region (stab04)
  misc_feature (1)..(1): 5'-3 attached terminal deoxyabasic moiety, inverted abasic, inverted nucleotide or other terminal cap that is optionally present
  misc_feature (21)..(21): 3'-3 attached terminal deoxyabasic moiety, inverted abasic, inverted nucleotide or other terminal cap that is optionally present
  misc_feature (2)..(2): 2'-deoxy-2'Fluoro
  misc_feature (4)..(4): 2'-deoxy-2'Fluoro
  misc_feature (9)..(9): 2'-deoxy-2'Fluoro
  misc_feature (12)..(12): 2'-deoxy-2'Fluoro
  misc_feature (16)..(18): 2'-deoxy-2'Fluoro
  misc_feature (1). .(19): ribonucleotide unmodified or modified as described for this sequence
guacgaggcggcgggcccgtt

SEQ ID NO: 126 - DNA, 21 bp, Artificial Sequence
  Description of Artificial Sequence: Target Sequence/siNA antisense region (stab05)
  misc_feature (1)..(1): 2'-deoxy-2'Fluoro
  misc_feature (5)..(7): 2'-deoxy-2'Fluoro
  misc_feature (9)..(10): 2'-deoxy-2'Fluoro
  misc_feature (12)..(15): 2'-deoxy-2'Fluoro
  misc_feature (17)..(17): 2'-deoxy-2'Fluoro
  misc_feature (19)..(19): 2'-deoxy-2'Fluoro
  misc_feature (20)..(20): Phosphorothioate or Phosphorodithioate 3'-Internucleotide Linkage (optionally present)
  misc_feature (1). .(19): ribonucleotide unmodified or modified as described for this sequence
cgggcccgccgccucguactt

SEQ ID NO: 127 - DNA, 21 bp, Artificial Sequence
  Description of Artificial Sequence: Target Sequence/siNA sense region (stab07)
  misc_feature (1)..(1): 5'-3 attached terminal deoxyabasic moiety, inverted abasic, inverted nucleotide or other terminal cap that is optionally present
  misc_feature (21)..(21): 3'-3 attached terminal deoxyabasic moiety, inverted abasic, inverted nucleotide or other terminal cap that is optionally present
  misc_feature (2)..(2): 2'-deoxy-2'Fluoro
  misc_feature (4)..(4): 2'-deoxy-2'Fluoro
  misc_feature (9)..(9): 2'-deoxy-2'Fluoro
  misc_feature (12)..(12): 2'-deoxy-2'Fluoro
  misc_feature (16)..(18): 2'-deoxy-2'Fluoro
  misc_feature (1)..(19): ribonucleotide unmodified or modified as described for this sequence
guacgaggcggcgggcccgtt

SEQ ID NO: 128 - DNA, 21 bp, Artificial Sequence
  Description of Artificial Sequence: Target Sequence/siNA antisense region (stab08)
  misc_feature (1)..(1): 2'-deoxy-2'Fluoro
  misc_feature (2)..(4): 2'-O-methyl
  misc_feature (5)..(7): 2'-deoxy-2'Fluoro
  misc_feature (8)..(8): 2'-O-methyl
  misc_feature (9)..(10): 2'-deoxy-2'Fluoro
  misc_feature (11)..(11): 2'-O-methyl
  misc_feature (12)..(15): 2'-deoxy-2'Fluoro
  misc_feature (16)..(16): 2'-O-methyl
  misc_feature (17)..(17): 2'-deoxy-2'Fluoro
  misc_feature (18)..(18): 2'-O-methyl
  misc_feature (19)..(19): 2'-deoxy-2'Fluoro
  misc_feature (20)..(20): Phosphorothioate or Phosphorodithioate 3'-Internucleotide Linkage (optionally present)
  misc_feature (1)..(19): ribonucleotide unmodified or modified as described for this sequence
cgggcccgccgccucguactt

SEQ ID NO: 129 - DNA, 21 bp, Artificial Sequence
  Description of Artificial Sequence: Target Sequence/siNA sense region (stab09)
  misc_feature (1)..(1): 5'-3 attached terminal deoxyabasic moiety, inverted abasic, inverted nucleotide or other terminal cap that is optionally present
  misc_feature (21)..(21): 3'-3 attached terminal deoxyabasic moiety, inverted abasic, inverted nucleotide or other terminal cap that is optionally present
  misc_feature (1)..(19): ribonucleotide unmodified or modified as described for this sequence
guacgaggcggcgggcccgtt

SEQ ID NO: 130 - DNA, 21 bp, Artificial Sequence
  Description of Artificial Sequence: Target Sequence/siNA antisense region (stab10)
  misc_feature (20)..(20): Phosphorothioate or Phosphorodithioate 3'-Internucleotide Linkage (optionally present)
  misc_feature (1)..(19): ribonucleotide unmodified or modified as described for this sequence
cgggcccgccgccucguactt

SEQ ID NO: 131 - DNA, 21 bp, Artificial Sequence
  Description of Artificial Sequence: Target Sequence/siNA antisense region (stab19)
  misc_feature (21)..(21): 3'-3 attached terminal deoxyabasic moiety, inverted abasic, inverted nucleotide or other terminal cap that is optionally present
  misc_feature (1)..(1): 2'-deoxy-2'Fluoro
  misc_feature (2)..(4): 2'-O-methyl
  misc_feature (5)..(7): 2'-deoxy-2'Fluoro
  misc_feature (8)..(8): 2'-O-methyl
  misc_feature (9)..(10): 2'-deoxy-2'Fluoro
  misc_feature (11)..(11): 2'-O-methyl
  misc_feature (12)..(15): 2'-deoxy-2'Fluoro
  misc_feature (16)..(16): 2'-O-methyl
  misc_feature (17)..(17): 2'-deoxy-2'Fluoro
  misc_feature (18)..(18): 2'-O-methyl
  misc_feature (19)..(19): 2'-deoxy-2'Fluoro
  misc_feature (1)..(19): ribonucleotide unmodified or modified as described for this sequence
cgggcccgccgccucguactt

SEQ ID NO: 132 - DNA, 21 bp, Artificial Sequence
  Description of Artificial Sequence: Target Sequence/siNA antisense region (stab22)
  misc_feature (21)..(21): 3'-3 attached terminal deoxyabasic moiety, inverted abasic, inverted nucleotide or other terminal cap that is optionally present
  misc_feature (20)..(20): Phosphorothioate or Phosphorodithioate 3'-Internucleotide Linkage (optionally present)
  misc_feature (1)..(19): ribonucleotide unmodified or modified as described for this sequence
cgggcccgccgccucguactt

SEQ ID NO: 133 - DNA, 21 bp, Artificial Sequence
  Description of Artificial Sequence: Target Sequence/siNA antisense region (stab25)
  misc_feature (4)..(4): 2'-O-methyl
  misc_feature (5)..(7): 2'-deoxy-2'Fluoro
  misc_feature (8)..(8): 2'-O-methyl
  misc_feature (9)..(10): 2'-deoxy-2'Fluoro
  misc_feature (11)..(11): 2'-O-methyl
  misc_feature (12)..(15): 2'-deoxy-2'Fluoro
  misc_feature (16)..(16): 2'-O-methyl
  misc_feature (17)..(17): 2'-deoxy-2'Fluoro
  misc_feature (18)..(18): 2'-O-methyl
  misc_feature (19)..(19): 2'-deoxy-2'Fluoro
  misc_feature (20)..(20): Phosphorothioate or Phosphorodithioate 3'-Internucleotide Linkage (optionally present)
  misc_feature (1). .(19): ribonucleotide unmodified or modified as described for this sequence
cgggcccgccgccucguactt

SEQ ID NO: 134 - RNA, 21 nt, Artificial Sequence
  Description of Artificial Sequence: Target Sequence/siNA antisense region (stab35)
  misc_feature (4)..(4): 2'-O-methyl
  misc_feature (5)..(7): 2'-deoxy-2'Fluoro
  misc_feature (8)..(8): 2'-O-methyl
  misc_feature (9)..(10): 2'-deoxy-2'Fluoro
  misc_feature (11)..(11): 2'-O-methyl
  misc_feature (12)..(15): 2'-deoxy-2'Fluoro
  misc_feature (16)..(16): 2'-O-methyl
  misc_feature (17)..(17): 2'-deoxy-2'Fluoro
  misc_feature (18)..(18): 2'-O-methyl
  misc_feature (19)..(19): 2'-deoxy-2'Fluoro
  misc_feature (20)..(21): 2'-O-methyl
cgggcccgccgccucguacuu

SEQ ID NO: 135 - RNA, 21 nt, Artificial Sequence
  Description of Artificial Sequence: Target Sequence/siNA antisense region (stab36)
  misc_feature (4)..(4): 2'-O-methyl
  misc_feature (5)..(7): 2'-deoxy-2'Fluoro
  misc_feature (8)..(8): 2'-O-methyl
  misc_feature (9)..(10): 2'-deoxy-2'Fluoro
  misc_feature (11)..(11): 2'-O-methyl
  misc_feature (12)..(15): 2'-deoxy-2'Fluoro
  misc_feature (16)..(16): 2'-O-methyl
  misc_feature (17)..(17): 2'-deoxy-2'Fluoro
  misc_feature (18)..(18): 2'-O-methyl
  misc_feature (19)..(19): 2'-deoxy-2'Fluoro
  misc_feature (20)..(21): 2'-O-methyl
cgggcccgccgccucguacgg

SEQ ID NO: 136 - RNA, 19 nt, Artificial Sequence
  Description of Artificial Sequence: Target Sequence/siNA sense region
ggcgggccucccggaggag

SEQ ID NO: 137 - RNA, 19 nt, Artificial Sequence
  Description of Artificial Sequence: Target Sequence/siNA antisense region
cuccuccgggaggcccgcc

SEQ ID NO: 138 - DNA, 21 bp, Artificial Sequence
  Description of Artificial Sequence: Target Sequence/siNA sense region (stab00)
  misc_feature (1)..(19): ribonucleotide unmodified or modified as described for this sequence
ggcgggccucccggaggagtt

SEQ ID NO: 139 - DNA, 21 bp, Artificial Sequence
  Description of Artificial Sequence: Target Sequence/siNA antisense region (stab00as)
  misc_feature (1)..(19): ribonucleotide unmodified or modified as described for this sequence
cuccuccgggaggcccgcctt

SEQ ID NO: 140 - DNA, 21 bp, Artificial Sequence
  Description of Artificial Sequence: Target Sequence/siNA sense region (stab04)
  misc_feature (1)..(1): 5'-3 attached terminal deoxyabasic moiety, inverted abasic, inverted nucleotide or other terminal cap that is optionally present
  misc_feature (21)..(21): 3'-3 attached terminal deoxyabasic moiety, inverted abasic, inverted nucleotide or other terminal cap that is optionally present
  misc_feature (3)..(3): 2'-deoxy-2'Fluoro
  misc_feature (7)..(12): 2'-deoxy-2'Fluoro
  misc_feature (1). .(19): ribonucleotide unmodified or modified as described for this sequence
ggcgggccucccggaggagtt

SEQ ID NO: 141 - DNA, 21 bp, Artificial Sequence
  Description of Artificial Sequence: Target Sequence/siNA antisense region (stab05)
  misc_feature (1)..(7): 2'-deoxy-2'Fluoro
  misc_feature (14)..(16): 2'-deoxy-2'Fluoro
  misc_feature (18)..(19): 2'-deoxy-2'Fluoro
  misc_feature (20)..(20): Phosphorothioate or Phosphorodithioate 3'-Internucleotide Linkage (optionally present)
  misc_feature (1). .(19): ribonucleotide unmodified or modified as described for this sequence
cuccuccgggaggcccgcctt

SEQ ID NO: 142 - DNA, 21 bp, Artificial Sequence
  Description of Artificial Sequence: Target Sequence/siNA sense region (stab07)
  misc_feature (1)..(1): 5'-3 attached terminal deoxyabasic moiety, inverted abasic, inverted nucleotide or other terminal cap that is optionally present
  misc_feature (21)..(21): 3'-3 attached terminal deoxyabasic moiety, inverted abasic, inverted nucleotide or other terminal cap that is optionally present
  misc_feature (3)..(3): 2'-deoxy-2'Fluoro
  misc_feature (7)..(12): 2'-deoxy-2'Fluoro
  misc_feature (1)..(19): ribonucleotide unmodified or modified as described for this sequence
ggcgggccucccggaggagtt

SEQ ID NO: 143 - DNA, 21 bp, Artificial Sequence
  Description of Artificial Sequence: Target Sequence/siNA antisense region (stab08)
  misc_feature (1)..(7): 2'-deoxy-2'Fluoro
  misc_feature (8)..(13): 2'-O-methyl
  misc_feature (14)..(16): 2'-deoxy-2'Fluoro
  misc_feature (17)..(17): 2'-O-methyl
  misc_feature (18)..(19): 2'-deoxy-2'Fluoro
  misc_feature (20)..(20): Phosphorothioate or Phosphorodithioate 3'-Internucleotide Linkage (optionally present)
  misc_feature (1)..(19): ribonucleotide unmodified or modified as described for this sequence
cuccuccgggaggcccgcctt

SEQ ID NO: 144 - DNA, 21 bp, Artificial Sequence
  Description of Artificial Sequence: Target Sequence/siNA sense region (stab09)
  misc_feature (1)..(1): 5'-3 attached terminal deoxyabasic moiety, inverted abasic, inverted nucleotide or other terminal cap that is optionally present
  misc_feature (21)..(21): 3'-3 attached terminal deoxyabasic moiety, inverted abasic, inverted nucleotide or other terminal cap that is optionally present
  misc_feature (1)..(19): ribonucleotide unmodified or modified as described for this sequence
ggcgggccucccggaggagtt

SEQ ID NO: 145 - DNA, 21 bp, Artificial Sequence
  Description of Artificial Sequence: Target Sequence/siNA antisense region (stab10)
  misc_feature (20)..(20): Phosphorothioate or Phosphorodithioate 3'-Internucleotide Linkage (optionally present)
  misc_feature (1)..(19): ribonucleotide unmodified or modified as described for this sequence
cuccuccgggaggcccgcctt

SEQ ID NO: 146 - DNA, 21 bp, Artificial Sequence
  Description of Artificial Sequence: Target Sequence/siNA antisense region (stab19)
  misc_feature (21)..(21): 3'-3 attached terminal deoxyabasic moiety, inverted abasic, inverted nucleotide or other terminal cap that is optionally present
  misc_feature (1)..(7): 2'-deoxy-2'Fluoro
  misc_feature (8)..(13): 2'-O-methyl
  misc_feature (14)..(16): 2'-deoxy-2'Fluoro
  misc_feature (17)..(17): 2'-O-methyl
  misc_feature (18)..(19): 2'-deoxy-2'Fluoro
  misc_feature (1)..(19): ribonucleotide unmodified or modified as described for this sequence
cuccuccgggaggcccgcctt

SEQ ID NO: 147 - DNA, 21 bp, Artificial Sequence
  Description of Artificial Sequence: Target Sequence/siNA antisense region (stab22)
  misc_feature (21)..(21): 3'-3 attached terminal deoxyabasic moiety, inverted abasic, inverted nucleotide or other terminal cap that is optionally present
  misc_feature (20)..(20): Phosphorothioate or Phosphorodithioate 3'-Internucleotide Linkage (optionally present)
  misc_feature (1)..(19): ribonucleotide unmodified or modified as described for this sequence
cuccuccgggaggcccgcctt

SEQ ID NO: 148 - DNA, 21 bp, Artificial Sequence
  Description of Artificial Sequence: Target Sequence/siNA antisense region (stab25)
  misc_feature (4)..(7): 2'-deoxy-2'Fluoro
  misc_feature (8)..(13): 2'-O-methyl
  misc_feature (14)..(16): 2'-deoxy-2'Fluoro
  misc_feature (17)..(17): 2'-O-methyl
  misc_feature (18)..(19): 2'-deoxy-2'Fluoro
  misc_feature (20)..(20): Phosphorothioate or Phosphorodithioate 3'-Internucleotide Linkage (optionally present)
  misc_feature (1). .(19): ribonucleotide unmodified or modified as described for this sequence
cuccuccgggaggcccgcctt

SEQ ID NO: 149 - RNA, 21 nt, Artificial Sequence
  Description of Artificial Sequence: Target Sequence/siNA antisense region (stab35)
  misc_feature (4)..(7): 2'-deoxy-2'Fluoro
  misc_feature (8)..(13): 2'-O-methyl
  misc_feature (14)..(16): 2'-deoxy-2'Fluoro
  misc_feature (17)..(17): 2'-O-methyl
  misc_feature (18)..(19): 2'-deoxy-2'Fluoro
  misc_feature (20)..(21): 2'-O-methyl
cuccuccgggaggcccgccuu

SEQ ID NO: 150 - RNA, 21 nt, Artificial Sequence
  Description of Artificial Sequence: Target Sequence/siNA antisense region (stab36)
  misc_feature (4)..(7): 2'-deoxy-2'Fluoro
  misc_feature (8)..(13): 2'-O-methyl
  misc_feature (14)..(16): 2'-deoxy-2'Fluoro
  misc_feature (17)..(17): 2'-O-methyl
  misc_feature (18)..(19): 2'-deoxy-2'Fluoro
  misc_feature (20)..(21): 2'-O-methyl
cuccuccgggaggcccgccgg

SEQ ID NO: 151 - RNA, 19 nt, Artificial Sequence
  Description of Artificial Sequence: Target Sequence/siNA sense region
ggcggcugcgccauggacg

SEQ ID NO: 152 - RNA, 19 nt, Artificial Sequence
  Description of Artificial Sequence: Target Sequence/siNA antisense region
cguccauggcgcagccgcc

SEQ ID NO: 153 - DNA, 21 bp, Artificial Sequence
  Description of Artificial Sequence: Target Sequence/siNA sense region (stab00)
  misc_feature (1)..(19): ribonucleotide unmodified or modified as described for this sequence
ggcggcugcgccauggacgtt

SEQ ID NO: 154 - DNA, 21 bp, Artificial Sequence
  Description of Artificial Sequence: Target Sequence/siNA antisense region (stab00as)
  misc_feature (1)..(19): ribonucleotide unmodified or modified as described for this sequence
cguccauggcgcagccgcctt

SEQ ID NO: 155 - DNA, 21 bp, Artificial Sequence
  Description of Artificial Sequence: Target Sequence/siNA sense region (stab04)
  misc_feature (1)..(1): 5'-3 attached terminal deoxyabasic moiety, inverted abasic, inverted nucleotide or other terminal cap that is optionally present
  misc_feature (21)..(21): 3'-3 attached terminal deoxyabasic moiety, inverted abasic, inverted nucleotide or other terminal cap that is optionally present
  misc_feature (3)..(3): 2'-deoxy-2'Fluoro
  misc_feature (6)..(7): 2'-deoxy-2'Fluoro
  misc_feature (9)..(9): 2'-deoxy-2'Fluoro
  misc_feature (11)..(12): 2'-deoxy-2'Fluoro
  misc_feature (14)..(14): 2'-deoxy-2'Fluoro
  misc_feature (18)..(18): 2'-deoxy-2'Fluoro
  misc_feature (1). .(19): ribonucleotide unmodified or modified as described for this sequence
ggcggcugcgccauggacgtt

SEQ ID NO: 156 - DNA, 21 bp, Artificial Sequence
  Description of Artificial Sequence: Target Sequence/siNA antisense region (stab05)
  misc_feature (1)..(1): 2'-deoxy-2'Fluoro
  misc_feature (3)..(5): 2'-deoxy-2'Fluoro
  misc_feature (7)..(7): 2'-deoxy-2'Fluoro
  misc_feature (10)..(10): 2'-deoxy-2'Fluoro
  misc_feature (12)..(12): 2'-deoxy-2'Fluoro
  misc_feature (15)..(16): 2'-deoxy-2'Fluoro
  misc_feature (18)..(19): 2'-deoxy-2'Fluoro
  misc_feature (20)..(20): Phosphorothioate or Phosphorodithioate 3'-Internucleotide Linkage (optionally present)
  misc_feature (1). .(19): ribonucleotide unmodified or modified as described for this sequence
cguccauggcgcagccgcctt

SEQ ID NO: 157 - DNA, 21 bp, Artificial Sequence
  Description of Artificial Sequence: Target Sequence/siNA sense region (stab07)
  misc_feature (1)..(1): 5'-3 attached terminal deoxyabasic moiety, inverted abasic, inverted nucleotide or other terminal cap that is optionally present
  misc_feature (21)..(21): 3'-3 attached terminal deoxyabasic moiety, inverted abasic, inverted nucleotide or other terminal cap that is optionally present
  misc_feature (3)..(3): 2'-deoxy-2'Fluoro
  misc_feature (6)..(7): 2'-deoxy-2'Fluoro
  misc_feature (9)..(9): 2'-deoxy-2'Fluoro
  misc_feature (11)..(12): 2'-deoxy-2'Fluoro
  misc_feature (14)..(14): 2'-deoxy-2'Fluoro
  misc_feature (18)..(18): 2'-deoxy-2'Fluoro
  misc_feature (1)..(19): ribonucleotide unmodified or modified as described for this sequence
ggcggcugcgccauggacgtt

SEQ ID NO: 158 - DNA, 21 bp, Artificial Sequence
  Description of Artificial Sequence: Target Sequence/siNA antisense region (stab08)
  misc_feature (1)..(1): 2'-deoxy-2'Fluoro
  misc_feature (2)..(2): 2'-O-methyl
  misc_feature (3)..(5): 2'-deoxy-2'Fluoro
  misc_feature (6)..(6): 2'-O-methyl
  misc_feature (7)..(7): 2'-deoxy-2'Fluoro
  misc_feature (8)..(9): 2'-O-methyl
  misc_feature (10)..(10): 2'-deoxy-2'Fluoro
  misc_feature (11)..(11): 2'-O-methyl
  misc_feature (12)..(12): 2'-deoxy-2'Fluoro
  misc_feature (13)..(14): 2'-O-methyl
  misc_feature (15)..(16): 2'-deoxy-2'Fluoro
  misc_feature (17)..(17): 2'-O-methyl
  misc_feature (18)..(19): 2'-deoxy-2'Fluoro
  misc_feature (20)..(20): Phosphorothioate or Phosphorodithioate 3'-Internucleotide Linkage (optionally present)
  misc_feature (1)..(19): ribonucleotide unmodified or modified as described for this sequence
cguccauggcgcagccgcctt

SEQ ID NO: 159 - DNA, 21 bp, Artificial Sequence
  Description of Artificial Sequence: Target Sequence/siNA sense region (stab09)
  misc_feature (1)..(1): 5'-3 attached terminal deoxyabasic moiety, inverted abasic, inverted nucleotide or other terminal cap that is optionally present
  misc_feature (21)..(21): 3'-3 attached terminal deoxyabasic moiety, inverted abasic, inverted nucleotide or other terminal cap that is optionally present
  misc_feature (1)..(19): ribonucleotide unmodified or modified as described for this sequence
ggcggcugcgccauggacgtt

SEQ ID NO: 160 - DNA, 21 bp, Artificial Sequence
  Description of Artificial Sequence: Target Sequence/siNA antisense region (stab10)
  misc_feature (20)..(20): Phosphorothioate or Phosphorodithioate 3'-Internucleotide Linkage (optionally present)
  misc_feature (1)..(19): ribonucleotide unmodified or modified as described for this sequence
cguccauggcgcagccgcctt

SEQ ID NO: 161 - DNA, 21 bp, Artificial Sequence
  Description of Artificial Sequence: Target Sequence/siNA antisense region (stab19)
  misc_feature (21)..(21): 3'-3 attached terminal deoxyabasic moiety, inverted abasic, inverted nucleotide or other terminal cap that is optionally present
  misc_feature (1)..(1): 2'-deoxy-2'Fluoro
  misc_feature (2)..(2): 2'-O-methyl
  misc_feature (3)..(5): 2'-deoxy-2'Fluoro
  misc_feature (6)..(6): 2'-O-methyl
  misc_feature (7)..(7): 2'-deoxy-2'Fluoro
  misc_feature (8)..(9): 2'-O-methyl
  misc_feature (10)..(10): 2'-deoxy-2'Fluoro
  misc_feature (11)..(11): 2'-O-methyl
  misc_feature (12)..(12): 2'-deoxy-2'Fluoro
  misc_feature (13)..(14): 2'-O-methyl
  misc_feature (15)..(16): 2'-deoxy-2'Fluoro
  misc_feature (17)..(17): 2'-O-methyl
  misc_feature (18)..(19): 2'-deoxy-2'Fluoro
  misc_feature (1)..(19): ribonucleotide unmodified or modified as described for this sequence
cguccauggcgcagccgcctt

SEQ ID NO: 162 - DNA, 21 bp, Artificial Sequence
  Description of Artificial Sequence: Target Sequence/siNA antisense region (stab22)
  misc_feature (21)..(21): 3'-3 attached terminal deoxyabasic moiety, inverted abasic, inverted nucleotide or other terminal cap that is optionally present
  misc_feature (20)..(20): Phosphorothioate or Phosphorodithioate 3'-Internucleotide Linkage (optionally present)
  misc_feature (1)..(19): ribonucleotide unmodified or modified as described for this sequence
cguccauggcgcagccgcctt

SEQ ID NO: 163 - DNA, 21 bp, Artificial Sequence
  Description of Artificial Sequence: Target Sequence/siNA antisense region (stab25)
  misc_feature (4)..(5): 2'-deoxy-2'Fluoro
  misc_feature (6)..(6): 2'-O-methyl
  misc_feature (7)..(7): 2'-deoxy-2'Fluoro
  misc_feature (8)..(9): 2'-O-methyl
  misc_feature (10)..(10): 2'-deoxy-2'Fluoro
  misc_feature (11)..(11): 2'-O-methyl
  misc_feature (12)..(12): 2'-deoxy-2'Fluoro
  misc_feature (13)..(14): 2'-O-methyl
  misc_feature (15)..(16): 2'-deoxy-2'Fluoro
  misc_feature (17)..(17): 2'-O-methyl
  misc_feature (18)..(19): 2'-deoxy-2'Fluoro
  misc_feature (20)..(20): Phosphorothioate or Phosphorodithioate 3'-Internucleotide Linkage (optionally present)
  misc_feature (1). .(19): ribonucleotide unmodified or modified as described for this sequence
cguccauggcgcagccgcctt

SEQ ID NO: 164 - RNA, 21 nt, Artificial Sequence
  Description of Artificial Sequence: Target Sequence/siNA antisense region (stab35)
  misc_feature (4)..(5): 2'-deoxy-2'Fluoro
  misc_feature (6)..(6): 2'-O-methyl
  misc_feature (7)..(7): 2'-deoxy-2'Fluoro
  misc_feature (8)..(9): 2'-O-methyl
  misc_feature (10)..(10): 2'-deoxy-2'Fluoro
  misc_feature (11)..(11): 2'-O-methyl
  misc_feature (12)..(12): 2'-deoxy-2'Fluoro
  misc_feature (13)..(14): 2'-O-methyl
  misc_feature (15)..(16): 2'-deoxy-2'Fluoro
  misc_feature (17)..(17): 2'-O-methyl
  misc_feature (18)..(19): 2'-deoxy-2'Fluoro
  misc_feature (20)..(21): 2'-O-methyl
cguccauggcgcagccgccuu

SEQ ID NO: 165 - RNA, 21 nt, Artificial Sequence
  Description of Artificial Sequence: Target Sequence/siNA antisense region (stab36)
  misc_feature (4)..(5): 2'-deoxy-2'Fluoro
  misc_feature (6)..(6): 2'-O-methyl
  misc_feature (7)..(7): 2'-deoxy-2'Fluoro
  misc_feature (8)..(9): 2'-O-methyl
  misc_feature (10)..(10): 2'-deoxy-2'Fluoro
  misc_feature (11)..(11): 2'-O-methyl
  misc_feature (12)..(12): 2'-deoxy-2'Fluoro
  misc_feature (13)..(14): 2'-O-methyl
  misc_feature (15)..(16): 2'-deoxy-2'Fluoro
  misc_feature (17)..(17): 2'-O-methyl
  misc_feature (18)..(19): 2'-deoxy-2'Fluoro
  misc_feature (20)..(21): 2'-O-methyl
cguccauggcgcagccgccuc

SEQ ID NO: 166 - RNA, 19 nt, Artificial Sequence
  Description of Artificial Sequence: Target Sequence/siNA sense region
gagccacccuucagcgagg

SEQ ID NO: 167 - RNA, 19 nt, Artificial Sequence
  Description of Artificial Sequence: Target Sequence/siNA antisense region
ccucgcugaaggguggcuc

SEQ ID NO: 168 - DNA, 21 bp, Artificial Sequence
  Description of Artificial Sequence: Target Sequence/siNA sense region (stab00)
  misc_feature (1)..(19): ribonucleotide unmodified or modified as described for this sequence
gagccacccuucagcgaggtt

SEQ ID NO: 169 - DNA, 21 bp, Artificial Sequence
  Description of Artificial Sequence: Target Sequence/siNA antisense region (stab00as)
  misc_feature (1)..(19): ribonucleotide unmodified or modified as described for this sequence
ccucgcugaaggguggcuctt

SEQ ID NO: 170 - DNA, 21 bp, Artificial Sequence
  Description of Artificial Sequence: Target Sequence/siNA sense region (stab04)
  misc_feature (1)..(1): 5'-3 attached terminal deoxyabasic moiety, inverted abasic, inverted nucleotide or other terminal cap that is optionally present
  misc_feature (21)..(21): 3'-3 attached terminal deoxyabasic moiety, inverted abasic, inverted nucleotide or other terminal cap that is optionally present
  misc_feature (4)..(5): 2'-deoxy-2'Fluoro
  misc_feature (7)..(12): 2'-deoxy-2'Fluoro
  misc_feature (15)..(15): 2'-deoxy-2'Fluoro
  misc_feature (1). .(19): ribonucleotide unmodified or modified as described for this sequence
gagccacccuucagcgaggtt

SEQ ID NO: 171 - DNA, 21 bp, Artificial Sequence
  Description of Artificial Sequence: Target Sequence/siNA antisense region (stab05)
  misc_feature (1)..(4): 2'-deoxy-2'Fluoro
  misc_feature (6)..(7): 2'-deoxy-2'Fluoro
  misc_feature (14)..(14): 2'-deoxy-2'Fluoro
  misc_feature (17)..(19): 2'-deoxy-2'Fluoro
  misc_feature (20)..(20): Phosphorothioate or Phosphorodithioate 3'-Internucleotide Linkage (optionally present)
  misc_feature (1). .(19): ribonucleotide unmodified or modified as described for this sequence
ccucgcugaaggguggcuctt

SEQ ID NO: 172 - DNA, 21 bp, Artificial Sequence
  Description of Artificial Sequence: Target Sequence/siNA sense region (stab07)
  misc_feature (1)..(1): 5'-3 attached terminal deoxyabasic moiety, inverted abasic, inverted nucleotide or other terminal cap that is optionally present
  misc_feature (21)..(21): 3'-3 attached terminal deoxyabasic moiety, inverted abasic, inverted nucleotide or other terminal cap that is optionally present
  misc_feature (4)..(5): 2'-deoxy-2'Fluoro
  misc_feature (7)..(12): 2'-deoxy-2'Fluoro
  misc_feature (15)..(15): 2'-deoxy-2'Fluoro
  misc_feature (1)..(19): ribonucleotide unmodified or modified as described for this sequence
gagccacccuucagcgaggtt

SEQ ID NO: 173 - DNA, 21 bp, Artificial Sequence
  Description of Artificial Sequence: Target Sequence/siNA antisense region (stab08)
  misc_feature (1)..(4): 2'-deoxy-2'Fluoro
  misc_feature (5)..(5): 2'-O-methyl
  misc_feature (6)..(7): 2'-deoxy-2'Fluoro
  misc_feature (8)..(13): 2'-O-methyl
  misc_feature (14)..(14): 2'-deoxy-2'Fluoro
  misc_feature (15)..(16): 2'-O-methyl
  misc_feature (17)..(19): 2'-deoxy-2'Fluoro
  misc_feature (20)..(20): Phosphorothioate or Phosphorodithioate 3'-Internucleotide Linkage (optionally present)
  misc_feature (1)..(19): ribonucleotide unmodified or modified as described for this sequence
ccucgcugaaggguggcuctt

SEQ ID NO: 174 - DNA, 21 bp, Artificial Sequence
  Description of Artificial Sequence: Target Sequence/siNA sense region (stab09)
  misc_feature (1)..(1): 5'-3 attached terminal deoxyabasic moiety, inverted abasic, inverted nucleotide or other terminal cap that is optionally present
  misc_feature (21)..(21): 3'-3 attached terminal deoxyabasic moiety, inverted abasic, inverted nucleotide or other terminal cap that is optionally present
  misc_feature (1)..(19): ribonucleotide unmodified or modified as described for this sequence
gagccacccuucagcgaggtt

SEQ ID NO: 175 - DNA, 21 bp, Artificial Sequence
  Description of Artificial Sequence: Target Sequence/siNA antisense region (stab10)
  misc_feature (20)..(20): Phosphorothioate or Phosphorodithioate 3'-Internucleotide Linkage (optionally present)
  misc_feature (1)..(19): ribonucleotide unmodified or modified as described for this sequence
ccucgcugaaggguggcuctt

SEQ ID NO: 176 - DNA, 21 bp, Artificial Sequence
  Description of Artificial Sequence: Target Sequence/siNA antisense region (stab19)
  misc_feature (21)..(21): 3'-3 attached terminal deoxyabasic moiety, inverted abasic, inverted nucleotide or other terminal cap that is optionally present
  misc_feature (1)..(4): 2'-deoxy-2'Fluoro
  misc_feature (5)..(5): 2'-O-methyl
  misc_feature (6)..(7): 2'-deoxy-2'Fluoro
  misc_feature (8)..(13): 2'-O-methyl
  misc_feature (14)..(14): 2'-deoxy-2'Fluoro
  misc_feature (15)..(16): 2'-O-methyl
  misc_feature (17)..(19): 2'-deoxy-2'Fluoro
  misc_feature (1)..(19): ribonucleotide unmodified or modified as described for this sequence
ccucgcugaaggguggcuctt

SEQ ID NO: 177 - DNA, 21 bp, Artificial Sequence
  Description of Artificial Sequence: Target Sequence/siNA antisense region (stab22)
  misc_feature (21)..(21): 3'-3 attached terminal deoxyabasic moiety, inverted abasic, inverted nucleotide or other terminal cap that is optionally present
  misc_feature (20)..(20): Phosphorothioate or Phosphorodithioate 3'-Internucleotide Linkage (optionally present)
  misc_feature (1)..(19): ribonucleotide unmodified or modified as described for this sequence
ccucgcugaaggguggcuctt

SEQ ID NO: 178 - DNA, 21 bp, Artificial Sequence
  Description of Artificial Sequence: Target Sequence/siNA antisense region (stab25)
  misc_feature (4)..(4): 2'-deoxy-2'Fluoro
  misc_feature (5)..(5): 2'-O-methyl
  misc_feature (6)..(7): 2'-deoxy-2'Fluoro
  misc_feature (8)..(13): 2'-O-methyl
  misc_feature (14)..(14): 2'-deoxy-2'Fluoro
  misc_feature (15)..(16): 2'-O-methyl
  misc_feature (17)..(19): 2'-deoxy-2'Fluoro
  misc_feature (20)..(20): Phosphorothioate or Phosphorodithioate 3'-Internucleotide Linkage (optionally present)
  misc_feature (1). .(19): ribonucleotide unmodified or modified as described for this sequence
ccucgcugaaggguggcuctt

SEQ ID NO: 179 - RNA, 21 nt, Artificial Sequence
  Description of Artificial Sequence: Target Sequence/siNA antisense region (stab35)
  misc_feature (4)..(4): 2'-deoxy-2'Fluoro
  misc_feature (5)..(5): 2'-O-methyl
  misc_feature (6)..(7): 2'-deoxy-2'Fluoro
  misc_feature (8)..(13): 2'-O-methyl
  misc_feature (14)..(14): 2'-deoxy-2'Fluoro
  misc_feature (15)..(16): 2'-O-methyl
  misc_feature (17)..(19): 2'-deoxy-2'Fluoro
  misc_feature (20)..(21): 2'-O-methyl
ccucgcugaaggguggcucuu

SEQ ID NO: 180 - RNA, 21 nt, Artificial Sequence
  Description of Artificial Sequence: Target Sequence/siNA antisense region (stab36)
  misc_feature (4)..(4): 2'-deoxy-2'Fluoro
  misc_feature (5)..(5): 2'-O-methyl
  misc_feature (6)..(7): 2'-deoxy-2'Fluoro
  misc_feature (8)..(13): 2'-O-methyl
  misc_feature (14)..(14): 2'-deoxy-2'Fluoro
  misc_feature (15)..(16): 2'-O-methyl
  misc_feature (17)..(19): 2'-deoxy-2'Fluoro
  misc_feature (20)..(21): 2'-O-methyl
ccucgcugaaggguggcucgu

SEQ ID NO: 181 - RNA, 19 nt, Artificial Sequence
  Description of Artificial Sequence: Target Sequence/siNA sense region
gcggcuuuggagcaggcgc

SEQ ID NO: 182 - RNA, 19 nt, Artificial Sequence
  Description of Artificial Sequence: Target Sequence/siNA antisense region
gcgccugcuccaaagccgc

SEQ ID NO: 183 - DNA, 21 bp, Artificial Sequence
  Description of Artificial Sequence: Target Sequence/siNA sense region (stab00)
  misc_feature (1)..(19): ribonucleotide unmodified or modified as described for this sequence
gcggcuuuggagcaggcgctt

SEQ ID NO: 184 - DNA, 21 bp, Artificial Sequence
  Description of Artificial Sequence: Target Sequence/siNA antisense region (stab00as)
  misc_feature (1)..(19): ribonucleotide unmodified or modified as described for this sequence
gcgccugcuccaaagccgctt

SEQ ID NO: 185 - DNA, 21 bp, Artificial Sequence
  Description of Artificial Sequence: Target Sequence/siNA sense region (stab04)
  misc_feature (1)..(1): 5'-3 attached terminal deoxyabasic moiety, inverted abasic, inverted nucleotide or other terminal cap that is optionally present
  misc_feature (21)..(21): 3'-3 attached terminal deoxyabasic moiety, inverted abasic, inverted nucleotide or other terminal cap that is optionally present
  misc_feature (2)..(2): 2'-deoxy-2'Fluoro
  misc_feature (5)..(8): 2'-deoxy-2'Fluoro
  misc_feature (13)..(13): 2'-deoxy-2'Fluoro
  misc_feature (17)..(17): 2'-deoxy-2'Fluoro
  misc_feature (19)..(19): 2'-deoxy-2'Fluoro
  misc_feature (1). .(19): ribonucleotide unmodified or modified as described for this sequence
gcggcuuuggagcaggcgctt

SEQ ID NO: 186 - DNA, 21 bp, Artificial Sequence
  Description of Artificial Sequence: Target Sequence/siNA antisense region (stab05)
  misc_feature (2)..(2): 2'-deoxy-2'Fluoro
  misc_feature (4)..(6): 2'-deoxy-2'Fluoro
  misc_feature (8)..(11): 2'-deoxy-2'Fluoro
  misc_feature (16)..(17): 2'-deoxy-2'Fluoro
  misc_feature (19)..(19): 2'-deoxy-2'Fluoro
  misc_feature (20)..(20): Phosphorothioate or Phosphorodithioate 3'-Internucleotide Linkage (optionally present)
  misc_feature (1). .(19): ribonucleotide unmodified or modified as described for this sequence
gcgccugcuccaaagccgctt

SEQ ID NO: 187 - DNA, 21 bp, Artificial Sequence
  Description of Artificial Sequence: Target Sequence/siNA sense region (stab07)
  misc_feature (1)..(1): 5'-3 attached terminal deoxyabasic moiety, inverted abasic, inverted nucleotide or other terminal cap that is optionally present
  misc_feature (21)..(21): 3'-3 attached terminal deoxyabasic moiety, inverted abasic, inverted nucleotide or other terminal cap that is optionally present
  misc_feature (2)..(2): 2'-deoxy-2'Fluoro
  misc_feature (5)..(8): 2'-deoxy-2'Fluoro
  misc_feature (13)..(13): 2'-deoxy-2'Fluoro
  misc_feature (17)..(17): 2'-deoxy-2'Fluoro
  misc_feature (19)..(19): 2'-deoxy-2'Fluoro
  misc_feature (1)..(19): ribonucleotide unmodified or modified as described for this sequence
gcggcuuuggagcaggcgctt

SEQ ID NO: 188 - DNA, 21 bp, Artificial Sequence
  Description of Artificial Sequence: Target Sequence/siNA antisense region (stab08)
  misc_feature (1)..(1): 2'-O-methyl
  misc_feature (2)..(2): 2'-deoxy-2'Fluoro
  misc_feature (3)..(3): 2'-O-methyl
  misc_feature (4)..(6): 2'-deoxy-2'Fluoro
  misc_feature (7)..(7): 2'-O-methyl
  misc_feature (8)..(11): 2'-deoxy-2'Fluoro
  misc_feature (12)..(15): 2'-O-methyl
  misc_feature (16)..(17): 2'-deoxy-2'Fluoro
  misc_feature (18)..(18): 2'-O-methyl
  misc_feature (19)..(19): 2'-deoxy-2'Fluoro
  misc_feature (20)..(20): Phosphorothioate or Phosphorodithioate 3'-Internucleotide Linkage (optionally present)
  misc_feature (1)..(19): ribonucleotide unmodified or modified as described for this sequence
gcgccugcuccaaagccgctt

SEQ ID NO: 189 - DNA, 21 bp, Artificial Sequence
  Description of Artificial Sequence: Target Sequence/siNA sense region (stab09)
  misc_feature (1)..(1): 5'-3 attached terminal deoxyabasic moiety, inverted abasic, inverted nucleotide or other terminal cap that is optionally present
  misc_feature (21)..(21): 3'-3 attached terminal deoxyabasic moiety, inverted abasic, inverted nucleotide or other terminal cap that is optionally present
  misc_feature (1)..(19): ribonucleotide unmodified or modified as described for this sequence
gcggcuuuggagcaggcgctt

SEQ ID NO: 190 - DNA, 21 bp, Artificial Sequence
  Description of Artificial Sequence: Target Sequence/siNA antisense region (stab10)
  misc_feature (20)..(20): Phosphorothioate or Phosphorodithioate 3'-Internucleotide Linkage (optionally present)
  misc_feature (1)..(19): ribonucleotide unmodified or modified as described for this sequence
gcgccugcuccaaagccgctt

SEQ ID NO: 191 - DNA, 21 bp, Artificial Sequence
  Description of Artificial Sequence: Target Sequence/siNA antisense region (stab19)
  misc_feature (21)..(21): 3'-3 attached terminal deoxyabasic moiety, inverted abasic, inverted nucleotide or other terminal cap that is optionally present
  misc_feature (1)..(1): 2'-O-methyl
  misc_feature (2)..(2): 2'-deoxy-2'Fluoro
  misc_feature (3)..(3): 2'-O-methyl
  misc_feature (4)..(6): 2'-deoxy-2'Fluoro
  misc_feature (7)..(7): 2'-O-methyl
  misc_feature (8)..(11): 2'-deoxy-2'Fluoro
  misc_feature (12)..(15): 2'-O-methyl
  misc_feature (16)..(17): 2'-deoxy-2'Fluoro
  misc_feature (18)..(18): 2'-O-methyl
  misc_feature (19)..(19): 2'-deoxy-2'Fluoro
  misc_feature (1)..(19): ribonucleotide unmodified or modified as described for this sequence
gcgccugcuccaaagccgctt

SEQ ID NO: 192 - DNA, 21 bp, Artificial Sequence
  Description of Artificial Sequence: Target Sequence/siNA antisense region (stab22)
  misc_feature (21)..(21): 3'-3 attached terminal deoxyabasic moiety, inverted abasic, inverted nucleotide or other terminal cap that is optionally present
  misc_feature (20)..(20): Phosphorothioate or Phosphorodithioate 3'-Internucleotide Linkage (optionally present)
  misc_feature (1)..(19): ribonucleotide unmodified or modified as described for this sequence
gcgccugcuccaaagccgctt

SEQ ID NO: 193 - DNA, 21 bp, Artificial Sequence
  Description of Artificial Sequence: Target Sequence/siNA antisense region (stab25)
  misc_feature (4)..(6): 2'-deoxy-2'Fluoro
  misc_feature (7)..(7): 2'-O-methyl
  misc_feature (8)..(11): 2'-deoxy-2'Fluoro
  misc_feature (12)..(15): 2'-O-methyl
  misc_feature (16)..(17): 2'-deoxy-2'Fluoro
  misc_feature (18)..(18): 2'-O-methyl
  misc_feature (19)..(19): 2'-deoxy-2'Fluoro
  misc_feature (20)..(20): Phosphorothioate or Phosphorodithioate 3'-Internucleotide Linkage (optionally present)
  misc_feature (1). .(19): ribonucleotide unmodified or modified as described for this sequence
gcgccugcuccaaagccgctt

SEQ ID NO: 194 - RNA, 21 nt, Artificial Sequence
  Description of Artificial Sequence: Target Sequence/siNA antisense region (stab35)
  misc_feature (4)..(6): 2'-deoxy-2'Fluoro
  misc_feature (7)..(7): 2'-O-methyl
  misc_feature (8)..(11): 2'-deoxy-2'Fluoro
  misc_feature (12)..(15): 2'-O-methyl
  misc_feature (16)..(17): 2'-deoxy-2'Fluoro
  misc_feature (18)..(18): 2'-O-methyl
  misc_feature (19)..(19): 2'-deoxy-2'Fluoro
  misc_feature (20)..(21): 2'-O-methyl
gcgccugcuccaaagccgcuu

SEQ ID NO: 195 - RNA, 21 nt, Artificial Sequence
  Description of Artificial Sequence: Target Sequence/siNA antisense region (stab36)
  misc_feature (4)..(6): 2'-deoxy-2'Fluoro
  misc_feature (7)..(7): 2'-O-methyl
  misc_feature (8)..(11): 2'-deoxy-2'Fluoro
  misc_feature (12)..(15): 2'-O-methyl
  misc_feature (16)..(17): 2'-deoxy-2'Fluoro
  misc_feature (18)..(18): 2'-O-methyl
  misc_feature (19)..(19): 2'-deoxy-2'Fluoro
  misc_feature (20)..(21): 2'-O-methyl
gcgccugcuccaaagccgccu

SEQ ID NO: 196 - RNA, 19 nt, Artificial Sequence
  Description of Artificial Sequence: Target Sequence/siNA sense region
cugggcgagccgugcgauc

SEQ ID NO: 197 - RNA, 19 nt, Artificial Sequence
  Description of Artificial Sequence: Target Sequence/siNA antisense region
gaucgcacggcucgcccag

SEQ ID NO: 198 - DNA, 21 bp, Artificial Sequence
  Description of Artificial Sequence: Target Sequence/siNA sense region (stab00)
  misc_feature (1)..(19): ribonucleotide unmodified or modified as described for this sequence
cugggcgagccgugcgauctt

SEQ ID NO: 199 - DNA, 21 bp, Artificial Sequence
  Description of Artificial Sequence: Target Sequence/siNA antisense region (stab00as)
  misc_feature (1)..(19): ribonucleotide unmodified or modified as described for this sequence
gaucgcacggcucgcccagtt

SEQ ID NO: 200 - DNA, 21 bp, Artificial Sequence
  Description of Artificial Sequence: Target Sequence/siNA sense region (stab04)
  misc_feature (1)..(1): 5'-3 attached terminal deoxyabasic moiety, inverted abasic, inverted nucleotide or other terminal cap that is optionally present
  misc_feature (21)..(21): 3'-3 attached terminal deoxyabasic moiety, inverted abasic, inverted nucleotide or other terminal cap that is optionally present
  misc_feature (1)..(2): 2'-deoxy-2'Fluoro
  misc_feature (6)..(6): 2'-deoxy-2'Fluoro
  misc_feature (10)..(11): 2'-deoxy-2'Fluoro
  misc_feature (13)..(13): 2'-deoxy-2'Fluoro
  misc_feature (15)..(15): 2'-deoxy-2'Fluoro
  misc_feature (18)..(19): 2'-deoxy-2'Fluoro
  misc_feature (1). .(19): ribonucleotide unmodified or modified as described for this sequence
cugggcgagccgugcgauctt

SEQ ID NO: 201 - DNA, 21 bp, Artificial Sequence
  Description of Artificial Sequence: Target Sequence/siNA antisense region (stab05)
  misc_feature (3)..(4): 2'-deoxy-2'Fluoro
  misc_feature (6)..(6): 2'-deoxy-2'Fluoro
  misc_feature (8)..(8): 2'-deoxy-2'Fluoro
  misc_feature (11)..(13): 2'-deoxy-2'Fluoro
  misc_feature (15)..(17): 2'-deoxy-2'Fluoro
  misc_feature (20)..(20): Phosphorothioate or Phosphorodithioate 3'-Internucleotide Linkage (optionally present)
  misc_feature (1). .(19): ribonucleotide unmodified or modified as described for this sequence
gaucgcacggcucgcccagtt

SEQ ID NO: 202 - DNA, 21 bp, Artificial Sequence
  Description of Artificial Sequence: Target Sequence/siNA sense region (stab07)
  misc_feature (1)..(1): 5'-3 attached terminal deoxyabasic moiety, inverted abasic, inverted nucleotide or other terminal cap that is optionally present
  misc_feature (21)..(21): 3'-3 attached terminal deoxyabasic moiety, inverted abasic, inverted nucleotide or other terminal cap that is optionally present
  misc_feature (1)..(2): 2'-deoxy-2'Fluoro
  misc_feature (6)..(6): 2'-deoxy-2'Fluoro
  misc_feature (10)..(11): 2'-deoxy-2'Fluoro
  misc_feature (13)..(13): 2'-deoxy-2'Fluoro
  misc_feature (15)..(15): 2'-deoxy-2'Fluoro
  misc_feature (18)..(19): 2'-deoxy-2'Fluoro
  misc_feature (1)..(19): ribonucleotide unmodified or modified as described for this sequence
cugggcgagccgugcgauctt

SEQ ID NO: 203 - DNA, 21 bp, Artificial Sequence
  Description of Artificial Sequence: Target Sequence/siNA antisense region (stab08)
  misc_feature (1)..(2): 2'-O-methyl
  misc_feature (3)..(4): 2'-deoxy-2'Fluoro
  misc_feature (5)..(5): 2'-O-methyl
  misc_feature (6)..(6): 2'-deoxy-2'Fluoro
  misc_feature (7)..(7): 2'-O-methyl
  misc_feature (8)..(8): 2'-deoxy-2'Fluoro
  misc_feature (9)..(10): 2'-O-methyl
  misc_feature (11)..(13): 2'-deoxy-2'Fluoro
  misc_feature (14)..(14): 2'-O-methyl
  misc_feature (15)..(17): 2'-deoxy-2'Fluoro
  misc_feature (18)..(19): 2'-O-methyl
  misc_feature (20)..(20): Phosphorothioate or Phosphorodithioate 3'-Internucleotide Linkage (optionally present)
  misc_feature (1)..(19): ribonucleotide unmodified or modified as described for this sequence
gaucgcacggcucgcccagtt

SEQ ID NO: 204 - DNA, 21 bp, Artificial Sequence
  Description of Artificial Sequence: Target Sequence/siNA sense region (stab09)
  misc_feature (1)..(1): 5'-3 attached terminal deoxyabasic moiety, inverted abasic, inverted nucleotide or other terminal cap that is optionally present
  misc_feature (21)..(21): 3'-3 attached terminal deoxyabasic moiety, inverted abasic, inverted nucleotide or other terminal cap that is optionally present
  misc_feature (1)..(19): ribonucleotide unmodified or modified as described for this sequence
cugggcgagccgugcgauctt

SEQ ID NO: 205 - DNA, 21 bp, Artificial Sequence
  Description of Artificial Sequence: Target Sequence/siNA antisense region (stab10)
  misc_feature (20)..(20): Phosphorothioate or Phosphorodithioate 3'-Internucleotide Linkage (optionally present)
  misc_feature (1)..(19): ribonucleotide unmodified or modified as described for this sequence
gaucgcacggcucgcccagtt

SEQ ID NO: 206 - DNA, 21 bp, Artificial Sequence
  Description of Artificial Sequence: Target Sequence/siNA antisense region (stab19)
  misc_feature (21)..(21): 3'-3 attached terminal deoxyabasic moiety, inverted abasic, inverted nucleotide or other terminal cap that is optionally present
  misc_feature (1)..(2): 2'-O-methyl
  misc_feature (3)..(4): 2'-deoxy-2'Fluoro
  misc_feature (5)..(5): 2'-O-methyl
  misc_feature (6)..(6): 2'-deoxy-2'Fluoro
  misc_feature (7)..(7): 2'-O-methyl
  misc_feature (8)..(8): 2'-deoxy-2'Fluoro
  misc_feature (9)..(10): 2'-O-methyl
  misc_feature (11)..(13): 2'-deoxy-2'Fluoro
  misc_feature (14)..(14): 2'-O-methyl
  misc_feature (15)..(17): 2'-deoxy-2'Fluoro
  misc_feature (18)..(19): 2'-O-methyl
  misc_feature (1)..(19): ribonucleotide unmodified or modified as described for this sequence
gaucgcacggcucgcccagtt

SEQ ID NO: 207 - DNA, 21 bp, Artificial Sequence
  Description of Artificial Sequence: Target Sequence/siNA antisense region (stab22)
  misc_feature (21)..(21): 3'-3 attached terminal deoxyabasic moiety, inverted abasic, inverted nucleotide or other terminal cap that is optionally present
  misc_feature (20)..(20): Phosphorothioate or Phosphorodithioate 3'-Internucleotide Linkage (optionally present)
  misc_feature (1)..(19): ribonucleotide unmodified or modified as described for this sequence
gaucgcacggcucgcccagtt

SEQ ID NO: 208 - DNA, 21 bp, Artificial Sequence
  Description of Artificial Sequence: Target Sequence/siNA antisense region (stab25)
  misc_feature (4)..(4): 2'-deoxy-2'Fluoro
  misc_feature (5)..(5): 2'-O-methyl
  misc_feature (6)..(6): 2'-deoxy-2'Fluoro
  misc_feature (7)..(7): 2'-O-methyl
  misc_feature (8)..(8): 2'-deoxy-2'Fluoro
  misc_feature (9)..(10): 2'-O-methyl
  misc_feature (11)..(13): 2'-deoxy-2'Fluoro
  misc_feature (14)..(14): 2'-O-methyl
  misc_feature (15)..(17): 2'-deoxy-2'Fluoro
  misc_feature (18)..(19): 2'-O-methyl
  misc_feature (20)..(20): Phosphorothioate or Phosphorodithioate 3'-Internucleotide Linkage (optionally present)
  misc_feature (1). .(19): ribonucleotide unmodified or modified as described for this sequence
gaucgcacggcucgcccagtt

SEQ ID NO: 209 - RNA, 21 nt, Artificial Sequence
  Description of Artificial Sequence: Target Sequence/siNA antisense region (stab35)
  misc_feature (4)..(4): 2'-deoxy-2'Fluoro
  misc_feature (5)..(5): 2'-O-methyl
  misc_feature (6)..(6): 2'-deoxy-2'Fluoro
  misc_feature (7)..(7): 2'-O-methyl
  misc_feature (8)..(8): 2'-deoxy-2'Fluoro
  misc_feature (9)..(10): 2'-O-methyl
  misc_feature (11)..(13): 2'-deoxy-2'Fluoro
  misc_feature (14)..(14): 2'-O-methyl
  misc_feature (15)..(17): 2'-deoxy-2'Fluoro
  misc_feature (18)..(21): 2'-O-methyl
gaucgcacggcucgcccaguu

SEQ ID NO: 210 - RNA, 21 nt, Artificial Sequence
  Description of Artificial Sequence: Target Sequence/siNA antisense region (stab36)
  misc_feature (4)..(4): 2'-deoxy-2'Fluoro
  misc_feature (5)..(5): 2'-O-methyl
  misc_feature (6)..(6): 2'-deoxy-2'Fluoro
  misc_feature (7)..(7): 2'-O-methyl
  misc_feature (8)..(8): 2'-deoxy-2'Fluoro
  misc_feature (9)..(10): 2'-O-methyl
  misc_feature (11)..(13): 2'-deoxy-2'Fluoro
  misc_feature (14)..(14): 2'-O-methyl
  misc_feature (15)..(17): 2'-deoxy-2'Fluoro
  misc_feature (18)..(21): 2'-O-methyl
gaucgcacggcucgcccagcg

SEQ ID NO: 211 - RNA, 19 nt, Artificial Sequence
  Description of Artificial Sequence: Target Sequence/siNA sense region
cuggacgcggcgcugcuga

SEQ ID NO: 212 - RNA, 19 nt, Artificial Sequence
  Description of Artificial Sequence: Target Sequence/siNA antisense region
ucagcagcgccgcguccag

SEQ ID NO: 213 - DNA, 21 bp, Artificial Sequence
  Description of Artificial Sequence: Target Sequence/siNA sense region (stab00)
  misc_feature (1)..(19): ribonucleotide unmodified or modified as described for this sequence
cuggacgcggcgcugcugatt

SEQ ID NO: 214 - DNA, 21 bp, Artificial Sequence
  Description of Artificial Sequence: Target Sequence/siNA antisense region (stab00as)
  misc_feature (1)..(19): ribonucleotide unmodified or modified as described for this sequence
ucagcagcgccgcguccagtt

SEQ ID NO: 215 - DNA, 21 bp, Artificial Sequence
  Description of Artificial Sequence: Target Sequence/siNA sense region (stab04)
  misc_feature (1)..(1): 5'-3 attached terminal deoxyabasic moiety, inverted abasic, inverted nucleotide or other terminal cap that is optionally present
  misc_feature (21)..(21): 3'-3 attached terminal deoxyabasic moiety, inverted abasic, inverted nucleotide or other terminal cap that is optionally present
  misc_feature (1)..(2): 2'-deoxy-2'Fluoro
  misc_feature (6)..(6): 2'-deoxy-2'Fluoro
  misc_feature (8)..(8): 2'-deoxy-2'Fluoro
  misc_feature (11)..(11): 2'-deoxy-2'Fluoro
  misc_feature (13)..(14): 2'-deoxy-2'Fluoro
  misc_feature (16)..(17): 2'-deoxy-2'Fluoro
  misc_feature (1). .(19): ribonucleotide unmodified or modified as described for this sequence
cuggacgcggcgcugcugatt

SEQ ID NO: 216 - DNA, 21 bp, Artificial Sequence
  Description of Artificial Sequence: Target Sequence/siNA antisense region (stab05)
  misc_feature (1)..(2): 2'-deoxy-2'Fluoro
  misc_feature (5)..(5): 2'-deoxy-2'Fluoro
  misc_feature (8)..(8): 2'-deoxy-2'Fluoro
  misc_feature (10)..(11): 2'-deoxy-2'Fluoro
  misc_feature (13)..(13): 2'-deoxy-2'Fluoro
  misc_feature (15)..(17): 2'-deoxy-2'Fluoro
  misc_feature (20)..(20): Phosphorothioate or Phosphorodithioate 3'-Internucleotide Linkage (optionally present)
  misc_feature (1). .(19): ribonucleotide unmodified or modified as described for this sequence
ucagcagcgccgcguccagtt

SEQ ID NO: 217 - DNA, 21 bp, Artificial Sequence
  Description of Artificial Sequence: Target Sequence/siNA sense region (stab07)
  misc_feature (1)..(1): 5'-3 attached terminal deoxyabasic moiety, inverted abasic, inverted nucleotide or other terminal cap that is optionally present
  misc_feature (21)..(21): 3'-3 attached terminal deoxyabasic moiety, inverted abasic, inverted nucleotide or other terminal cap that is optionally present
  misc_feature (1)..(2): 2'-deoxy-2'Fluoro
  misc_feature (6)..(6): 2'-deoxy-2'Fluoro
  misc_feature (8)..(8): 2'-deoxy-2'Fluoro
  misc_feature (11)..(11): 2'-deoxy-2'Fluoro
  misc_feature (13)..(14): 2'-deoxy-2'Fluoro
  misc_feature (16)..(17): 2'-deoxy-2'Fluoro
  misc_feature (1)..(19): ribonucleotide unmodified or modified as described for this sequence
cuggacgcggcgcugcugatt

SEQ ID NO: 218 - DNA, 21 bp, Artificial Sequence
  Description of Artificial Sequence: Target Sequence/siNA antisense region (stab08)
  misc_feature (1)..(2): 2'-deoxy-2'Fluoro
  misc_feature (3)..(4): 2'-O-methyl
  misc_feature (5)..(5): 2'-deoxy-2'Fluoro
  misc_feature (6)..(7): 2'-O-methyl
  misc_feature (8)..(8): 2'-deoxy-2'Fluoro
  misc_feature (9)..(9): 2'-O-methyl
  misc_feature (10)..(11): 2'-deoxy-2'Fluoro
  misc_feature (12)..(12): 2'-O-methyl
  misc_feature (13)..(13): 2'-deoxy-2'Fluoro
  misc_feature (14)..(14): 2'-O-methyl
  misc_feature (15)..(17): 2'-deoxy-2'Fluoro
  misc_feature (18)..(19): 2'-O-methyl
  misc_feature (20)..(20): Phosphorothioate or Phosphorodithioate 3'-Internucleotide Linkage (optionally present)
  misc_feature (1)..(19): ribonucleotide unmodified or modified as described for this sequence
ucagcagcgccgcguccagtt

SEQ ID NO: 219 - DNA, 21 bp, Artificial Sequence
  Description of Artificial Sequence: Target Sequence/siNA sense region (stab09)
  misc_feature (1)..(1): 5'-3 attached terminal deoxyabasic moiety, inverted abasic, inverted nucleotide or other terminal cap that is optionally present
  misc_feature (21)..(21): 3'-3 attached terminal deoxyabasic moiety, inverted abasic, inverted nucleotide or other terminal cap that is optionally present
  misc_feature (1)..(19): ribonucleotide unmodified or modified as described for this sequence
cuggacgcggcgcugcugatt

SEQ ID NO: 220 - DNA, 21 bp, Artificial Sequence
  Description of Artificial Sequence: Target Sequence/siNA antisense region (stab10)
  misc_feature (20)..(20): Phosphorothioate or Phosphorodithioate 3'-Internucleotide Linkage (optionally present)
  misc_feature (1)..(19): ribonucleotide unmodified or modified as described for this sequence
ucagcagcgccgcguccagtt

SEQ ID NO: 221 - DNA, 21 bp, Artificial Sequence
  Description of Artificial Sequence: Target Sequence/siNA antisense region (stab19)
  misc_feature (21)..(21): 3'-3 attached terminal deoxyabasic moiety, inverted abasic, inverted nucleotide or other terminal cap that is optionally present
  misc_feature (1)..(2): 2'-deoxy-2'Fluoro
  misc_feature (3)..(4): 2'-O-methyl
  misc_feature (5)..(5): 2'-deoxy-2'Fluoro
  misc_feature (6)..(7): 2'-O-methyl
  misc_feature (8)..(8): 2'-deoxy-2'Fluoro
  misc_feature (9)..(9): 2'-O-methyl
  misc_feature (10)..(11): 2'-deoxy-2'Fluoro
  misc_feature (12)..(12): 2'-O-methyl
  misc_feature (13)..(13): 2'-deoxy-2'Fluoro
  misc_feature (14)..(14): 2'-O-methyl
  misc_feature (15)..(17): 2'-deoxy-2'Fluoro
  misc_feature (18)..(19): 2'-O-methyl
  misc_feature (1)..(19): ribonucleotide unmodified or modified as described for this sequence
ucagcagcgccgcguccagtt

SEQ ID NO: 222 - DNA, 21 bp, Artificial Sequence
  Description of Artificial Sequence: Target Sequence/siNA antisense region (stab22)
  misc_feature (21)..(21): 3'-3 attached terminal deoxyabasic moiety, inverted abasic, inverted nucleotide or other terminal cap that is optionally present
  misc_feature (20)..(20): Phosphorothioate or Phosphorodithioate 3'-Internucleotide Linkage (optionally present)
  misc_feature (1)..(19): ribonucleotide unmodified or modified as described for this sequence
ucagcagcgccgcguccagtt

SEQ ID NO: 223 - DNA, 21 bp, Artificial Sequence
  Description of Artificial Sequence: Target Sequence/siNA antisense region (stab25)
  misc_feature (4)..(4): 2'-O-methyl
  misc_feature (5)..(5): 2'-deoxy-2'Fluoro
  misc_feature (6)..(7): 2'-O-methyl
  misc_feature (8)..(8): 2'-deoxy-2'Fluoro
  misc_feature (9)..(9): 2'-O-methyl
  misc_feature (10)..(11): 2'-deoxy-2'Fluoro
  misc_feature (12)..(12): 2'-O-methyl
  misc_feature (13)..(13): 2'-deoxy-2'Fluoro
  misc_feature (14)..(14): 2'-O-methyl
  misc_feature (15)..(17): 2'-deoxy-2'Fluoro
  misc_feature (18)..(19): 2'-O-methyl
  misc_feature (20)..(20): Phosphorothioate or Phosphorodithioate 3'-Internucleotide Linkage (optionally present)
  misc_feature (1). .(19): ribonucleotide unmodified or modified as described for this sequence
ucagcagcgccgcguccagtt

SEQ ID NO: 224 - RNA, 21 nt, Artificial Sequence
  Description of Artificial Sequence: Target Sequence/siNA antisense region (stab35)
  misc_feature (4)..(4): 2'-O-methyl
  misc_feature (5)..(5): 2'-deoxy-2'Fluoro
  misc_feature (6)..(7): 2'-O-methyl
  misc_feature (8)..(8): 2'-deoxy-2'Fluoro
  misc_feature (9)..(9): 2'-O-methyl
  misc_feature (10)..(11): 2'-deoxy-2'Fluoro
  misc_feature (12)..(12): 2'-O-methyl
  misc_feature (13)..(13): 2'-deoxy-2'Fluoro
  misc_feature (14)..(14): 2'-O-methyl
  misc_feature (15)..(17): 2'-deoxy-2'Fluoro
  misc_feature (18)..(21): 2'-O-methyl
ucagcagcgccgcguccaguu

SEQ ID NO: 225 - RNA, 21 nt, Artificial Sequence
  Description of Artificial Sequence: Target Sequence/siNA antisense region (stab36)
  misc_feature (4)..(4): 2'-O-methyl
  misc_feature (5)..(5): 2'-deoxy-2'Fluoro
  misc_feature (6)..(7): 2'-O-methyl
  misc_feature (8)..(8): 2'-deoxy-2'Fluoro
  misc_feature (9)..(9): 2'-O-methyl
  misc_feature (10)..(11): 2'-deoxy-2'Fluoro
  misc_feature (12)..(12): 2'-O-methyl
  misc_feature (13)..(13): 2'-deoxy-2'Fluoro
  misc_feature (14)..(14): 2'-O-methyl
  misc_feature (15)..(17): 2'-deoxy-2'Fluoro
  misc_feature (18)..(21): 2'-O-methyl
ucagcagcgccgcguccagau

SEQ ID NO: 226 - RNA, 19 nt, Artificial Sequence
  Description of Artificial Sequence: Target Sequence/siNA sense region
accgacaucgaaggugaag

SEQ ID NO: 227 - RNA, 19 nt, Artificial Sequence
  Description of Artificial Sequence: Target Sequence/siNA antisense region
cuucaccuucgaugucggu

SEQ ID NO: 228 - DNA, 21 bp, Artificial Sequence
  Description of Artificial Sequence: Target Sequence/siNA sense region (stab00)
  misc_feature (1)..(19): ribonucleotide unmodified or modified as described for this sequence
accgacaucgaaggugaagtt

SEQ ID NO: 229 - DNA, 21 bp, Artificial Sequence
  Description of Artificial Sequence: Target Sequence/siNA antisense region (stab00as)
  misc_feature (1)..(19): ribonucleotide unmodified or modified as described for this sequence
cuucaccuucgaugucggutt

SEQ ID NO: 230 - DNA, 21 bp, Artificial Sequence
  Description of Artificial Sequence: Target Sequence/siNA sense region (stab04)
  misc_feature (1)..(1): 5'-3 attached terminal deoxyabasic moiety, inverted abasic, inverted nucleotide or other terminal cap that is optionally present
  misc_feature (21)..(21): 3'-3 attached terminal deoxyabasic moiety, inverted abasic, inverted nucleotide or other terminal cap that is optionally present
  misc_feature (2)..(3): 2'-deoxy-2'Fluoro
  misc_feature (6)..(6): 2'-deoxy-2'Fluoro
  misc_feature (8)..(9): 2'-deoxy-2'Fluoro
  misc_feature (15)..(15): 2'-deoxy-2'Fluoro
  misc_feature (1). .(19): ribonucleotide unmodified or modified as described for this sequence
accgacaucgaaggugaagtt

SEQ ID NO: 231 - DNA, 21 bp, Artificial Sequence
  Description of Artificial Sequence: Target Sequence/siNA antisense region (stab05)
  misc_feature (1)..(4): 2'-deoxy-2'Fluoro
  misc_feature (6)..(10): 2'-deoxy-2'Fluoro
  misc_feature (13)..(13): 2'-deoxy-2'Fluoro
  misc_feature (15)..(16): 2'-deoxy-2'Fluoro
  misc_feature (19)..(19): 2'-deoxy-2'Fluoro
  misc_feature (20)..(20): Phosphorothioate or Phosphorodithioate 3'-Internucleotide Linkage (optionally present)
  misc_feature (1). .(19): ribonucleotide unmodified or modified as described for this sequence
cuucaccuucgaugucggutt

SEQ ID NO: 232 - DNA, 21 bp, Artificial Sequence
  Description of Artificial Sequence: Target Sequence/siNA sense region (stab07)
  misc_feature (1)..(1): 5'-3 attached terminal deoxyabasic moiety, inverted abasic, inverted nucleotide or other terminal cap that is optionally present
  misc_feature (21)..(21): 3'-3 attached terminal deoxyabasic moiety, inverted abasic, inverted nucleotide or other terminal cap that is optionally present
  misc_feature (2)..(3): 2'-deoxy-2'Fluoro
  misc_feature (6)..(6): 2'-deoxy-2'Fluoro
  misc_feature (8)..(9): 2'-deoxy-2'Fluoro
  misc_feature (15)..(15): 2'-deoxy-2'Fluoro
  misc_feature (1)..(19): ribonucleotide unmodified or modified as described for this sequence
accgacaucgaaggugaagtt

SEQ ID NO: 233 - DNA, 21 bp, Artificial Sequence
  Description of Artificial Sequence: Target Sequence/siNA antisense region (stab08)
  misc_feature (1)..(4): 2'-deoxy-2'Fluoro
  misc_feature (5)..(5): 2'-O-methyl
  misc_feature (6)..(10): 2'-deoxy-2'Fluoro
  misc_feature (11)..(12): 2'-O-methyl
  misc_feature (13)..(13): 2'-deoxy-2'Fluoro
  misc_feature (14)..(14): 2'-O-methyl
  misc_feature (15)..(16): 2'-deoxy-2'Fluoro
  misc_feature (17)..(18): 2'-O-methyl
  misc_feature (19)..(19): 2'-deoxy-2'Fluoro
  misc_feature (20)..(20): Phosphorothioate or Phosphorodithioate 3'-Internucleotide Linkage (optionally present)
  misc_feature (1)..(19): ribonucleotide unmodified or modified as described for this sequence
cuucaccuucgaugucggutt

SEQ ID NO: 234 - DNA, 21 bp, Artificial Sequence
  Description of Artificial Sequence: Target Sequence/siNA sense region (stab09)
  misc_feature (1)..(1): 5'-3 attached terminal deoxyabasic moiety, inverted abasic, inverted nucleotide or other terminal cap that is optionally present
  misc_feature (21)..(21): 3'-3 attached terminal deoxyabasic moiety, inverted abasic, inverted nucleotide or other terminal cap that is optionally present
  misc_feature (1)..(19): ribonucleotide unmodified or modified as described for this sequence
accgacaucgaaggugaagtt

SEQ ID NO: 235 - DNA, 21 bp, Artificial Sequence
  Description of Artificial Sequence: Target Sequence/siNA antisense region (stab10)
  misc_feature (20)..(20): Phosphorothioate or Phosphorodithioate 3'-Internucleotide Linkage (optionally present)
  misc_feature (1)..(19): ribonucleotide unmodified or modified as described for this sequence
cuucaccuucgaugucggutt

SEQ ID NO: 236 - DNA, 21 bp, Artificial Sequence
  Description of Artificial Sequence: Target Sequence/siNA antisense region (stab19)
  misc_feature (21)..(21): 3'-3 attached terminal deoxyabasic moiety, inverted abasic, inverted nucleotide or other terminal cap that is optionally present
  misc_feature (1)..(4): 2'-deoxy-2'Fluoro
  misc_feature (5)..(5): 2'-O-methyl
  misc_feature (6)..(10): 2'-deoxy-2'Fluoro
  misc_feature (11)..(12): 2'-O-methyl
  misc_feature (13)..(13): 2'-deoxy-2'Fluoro
  misc_feature (14)..(14): 2'-O-methyl
  misc_feature (15)..(16): 2'-deoxy-2'Fluoro
  misc_feature (17)..(18): 2'-O-methyl
  misc_feature (19)..(19): 2'-deoxy-2'Fluoro
  misc_feature (1)..(19): ribonucleotide unmodified or modified as described for this sequence
cuucaccuucgaugucggutt

SEQ ID NO: 237 - DNA, 21 bp, Artificial Sequence
  Description of Artificial Sequence: Target Sequence/siNA antisense region (stab22)
  misc_feature (21)..(21): 3'-3 attached terminal deoxyabasic moiety, inverted abasic, inverted nucleotide or other terminal cap that is optionally present
  misc_feature (20)..(20): Phosphorothioate or Phosphorodithioate 3'-Internucleotide Linkage (optionally present)
  misc_feature (1)..(19): ribonucleotide unmodified or modified as described for this sequence
cuucaccuucgaugucggutt

SEQ ID NO: 238 - DNA, 21 bp, Artificial Sequence
  Description of Artificial Sequence: Target Sequence/siNA antisense region (stab25)
  misc_feature (4)..(4): 2'-deoxy-2'Fluoro
  misc_feature (5)..(5): 2'-O-methyl
  misc_feature (6)..(10): 2'-deoxy-2'Fluoro
  misc_feature (11)..(12): 2'-O-methyl
  misc_feature (13)..(13): 2'-deoxy-2'Fluoro
  misc_feature (14)..(14): 2'-O-methyl
  misc_feature (15)..(16): 2'-deoxy-2'Fluoro
  misc_feature (17)..(18): 2'-O-methyl
  misc_feature (19)..(19): 2'-deoxy-2'Fluoro
  misc_feature (20)..(20): Phosphorothioate or Phosphorodithioate 3'-Internucleotide Linkage (optionally present)
  misc_feature (1). .(19): ribonucleotide unmodified or modified as described for this sequence
cuucaccuucgaugucggutt

SEQ ID NO: 239 - RNA, 21 nt, Artificial Sequence
  Description of Artificial Sequence: Target Sequence/siNA antisense region (stab35)
  misc_feature (4)..(4): 2'-deoxy-2'Fluoro
  misc_feature (5)..(5): 2'-O-methyl
  misc_feature (6)..(10): 2'-deoxy-2'Fluoro
  misc_feature (11)..(12): 2'-O-methyl
  misc_feature (13)..(13): 2'-deoxy-2'Fluoro
  misc_feature (14)..(14): 2'-O-methyl
  misc_feature (15)..(16): 2'-deoxy-2'Fluoro
  misc_feature (17)..(18): 2'-O-methyl
  misc_feature (19)..(19): 2'-deoxy-2'Fluoro
  misc_feature (20)..(21): 2'-O-methyl
cuucaccuucgaugucgguuu

SEQ ID NO: 240 - RNA, 21 nt, Artificial Sequence
  Description of Artificial Sequence: Target Sequence/siNA antisense region (stab36)
  misc_feature (4)..(4): 2'-deoxy-2'Fluoro
  misc_feature (5)..(5): 2'-O-methyl
  misc_feature (6)..(10): 2'-deoxy-2'Fluoro
  misc_feature (11)..(12): 2'-O-methyl
  misc_feature (13)..(13): 2'-deoxy-2'Fluoro
  misc_feature (14)..(14): 2'-O-methyl
  misc_feature (15)..(16): 2'-deoxy-2'Fluoro
  misc_feature (17)..(18): 2'-O-methyl
  misc_feature (19)..(19): 2'-deoxy-2'Fluoro
  misc_feature (20)..(21): 2'-O-methyl
cuucaccuucgaugucgguca

SEQ ID NO: 241 - RNA, 19 nt, Artificial Sequence
  Description of Artificial Sequence: Target Sequence/siNA sense region
gucggcgcggggaggggua

SEQ ID NO: 242 - RNA, 19 nt, Artificial Sequence
  Description of Artificial Sequence: Target Sequence/siNA antisense region
uaccccuccccgcgccgac

SEQ ID NO: 243 - DNA, 21 bp, Artificial Sequence
  Description of Artificial Sequence: Target Sequence/siNA sense region (stab00)
  misc_feature (1)..(19): ribonucleotide unmodified or modified as described for this sequence
gucggcgcggggagggguatt

SEQ ID NO: 244 - DNA, 21 bp, Artificial Sequence
  Description of Artificial Sequence: Target Sequence/siNA antisense region (stab00as)
  misc_feature (1)..(19): ribonucleotide unmodified or modified as described for this sequence
uaccccuccccgcgccgactt

SEQ ID NO: 245 - DNA, 21 bp, Artificial Sequence
  Description of Artificial Sequence: Target Sequence/siNA sense region (stab04)
  misc_feature (1)..(1): 5'-3 attached terminal deoxyabasic moiety, inverted abasic, inverted nucleotide or other terminal cap that is optionally present
  misc_feature (21)..(21): 3'-3 attached terminal deoxyabasic moiety, inverted abasic, inverted nucleotide or other terminal cap that is optionally present
  misc_feature (2)..(3): 2'-deoxy-2'Fluoro
  misc_feature (6)..(6): 2'-deoxy-2'Fluoro
  misc_feature (8)..(8): 2'-deoxy-2'Fluoro
  misc_feature (18)..(18): 2'-deoxy-2'Fluoro
  misc_feature (1). .(19): ribonucleotide unmodified or modified as described for this sequence
gucggcgcggggagggguatt

SEQ ID NO: 246 - DNA, 21 bp, Artificial Sequence
  Description of Artificial Sequence: Target Sequence/siNA antisense region (stab05)
  misc_feature (1)..(1): 2'-deoxy-2'Fluoro
  misc_feature (3)..(11): 2'-deoxy-2'Fluoro
  misc_feature (13)..(13): 2'-deoxy-2'Fluoro
  misc_feature (15)..(16): 2'-deoxy-2'Fluoro
  misc_feature (19)..(19): 2'-deoxy-2'Fluoro
  misc_feature (20)..(20): Phosphorothioate or Phosphorodithioate 3'-Internucleotide Linkage (optionally present)
  misc_feature (1). .(19): ribonucleotide unmodified or modified as described for this sequence
uaccccuccccgcgccgactt

SEQ ID NO: 247 - DNA, 21 bp, Artificial Sequence
  Description of Artificial Sequence: Target Sequence/siNA sense region (stab07)
  misc_feature (1)..(1): 5'-3 attached terminal deoxyabasic moiety, inverted abasic, inverted nucleotide or other terminal cap that is optionally present
  misc_feature (21)..(21): 3'-3 attached terminal deoxyabasic moiety, inverted abasic, inverted nucleotide or other terminal cap that is optionally present
  misc_feature (2)..(3): 2'-deoxy-2'Fluoro
  misc_feature (6)..(6): 2'-deoxy-2'Fluoro
  misc_feature (8)..(8): 2'-deoxy-2'Fluoro
  misc_feature (18)..(18): 2'-deoxy-2'Fluoro
  misc_feature (1)..(19): ribonucleotide unmodified or modified as described for this sequence
gucggcgcggggagggguatt

SEQ ID NO: 248 - DNA, 21 bp, Artificial Sequence
  Description of Artificial Sequence: Target Sequence/siNA antisense region (stab08)
  misc_feature (1)..(1): 2'-deoxy-2'Fluoro
  misc_feature (2)..(2): 2'-O-methyl
  misc_feature (3)..(11): 2'-deoxy-2'Fluoro
  misc_feature (12)..(12): 2'-O-methyl
  misc_feature (13)..(13): 2'-deoxy-2'Fluoro
  misc_feature (14)..(14): 2'-O-methyl
  misc_feature (15)..(16): 2'-deoxy-2'Fluoro
  misc_feature (17)..(18): 2'-O-methyl
  misc_feature (19)..(19): 2'-deoxy-2'Fluoro
  misc_feature (20)..(20): Phosphorothioate or Phosphorodithioate 3'-Internucleotide Linkage (optionally present)
  misc_feature (1)..(19): ribonucleotide unmodified or modified as described for this sequence
uaccccuccccgcgccgactt

SEQ ID NO: 249 - DNA, 21 bp, Artificial Sequence
  Description of Artificial Sequence: Target Sequence/siNA sense region (stab09)
  misc_feature (1)..(1): 5'-3 attached terminal deoxyabasic moiety, inverted abasic, inverted nucleotide or other terminal cap that is optionally present
  misc_feature (21)..(21): 3'-3 attached terminal deoxyabasic moiety, inverted abasic, inverted nucleotide or other terminal cap that is optionally present
  misc_feature (1)..(19): ribonucleotide unmodified or modified as described for this sequence
gucggcgcggggagggguatt

SEQ ID NO: 250 - DNA, 21 bp, Artificial Sequence
  Description of Artificial Sequence: Target Sequence/siNA antisense region (stab10)
  misc_feature (20)..(20): Phosphorothioate or Phosphorodithioate 3'-Internucleotide Linkage (optionally present)
  misc_feature (1)..(19): ribonucleotide unmodified or modified as described for this sequence
uaccccuccccgcgccgactt

SEQ ID NO: 251 - DNA, 21 bp, Artificial Sequence
  Description of Artificial Sequence: Target Sequence/siNA antisense region (stab19)
  misc_feature (21)..(21): 3'-3 attached terminal deoxyabasic moiety, inverted abasic, inverted nucleotide or other terminal cap that is optionally present
  misc_feature (1)..(1): 2'-deoxy-2'Fluoro
  misc_feature (2)..(2): 2'-O-methyl
  misc_feature (3)..(11): 2'-deoxy-2'Fluoro
  misc_feature (12)..(12): 2'-O-methyl
  misc_feature (13)..(13): 2'-deoxy-2'Fluoro
  misc_feature (14)..(14): 2'-O-methyl
  misc_feature (15)..(16): 2'-deoxy-2'Fluoro
  misc_feature (17)..(18): 2'-O-methyl
  misc_feature (19)..(19): 2'-deoxy-2'Fluoro
  misc_feature (1)..(19): ribonucleotide unmodified or modified as described for this sequence
uaccccuccccgcgccgactt

SEQ ID NO: 252 - DNA, 21 bp, Artificial Sequence
  Description of Artificial Sequence: Target Sequence/siNA antisense region (stab22)
  misc_feature (21)..(21): 3'-3 attached terminal deoxyabasic moiety, inverted abasic, inverted nucleotide or other terminal cap that is optionally present
  misc_feature (20)..(20): Phosphorothioate or Phosphorodithioate 3'-Internucleotide Linkage (optionally present)
  misc_feature (1)..(19): ribonucleotide unmodified or modified as described for this sequence
uaccccuccccgcgccgactt

SEQ ID NO: 253 - DNA, 21 bp, Artificial Sequence
  Description of Artificial Sequence: Target Sequence/siNA antisense region (stab25)
  misc_feature (4)..(11): 2'-deoxy-2'Fluoro
  misc_feature (12)..(12): 2'-O-methyl
  misc_feature (13)..(13): 2'-deoxy-2'Fluoro
  misc_feature (14)..(14): 2'-O-methyl
  misc_feature (15)..(16): 2'-deoxy-2'Fluoro
  misc_feature (17)..(18): 2'-O-methyl
  misc_feature (19)..(19): 2'-deoxy-2'Fluoro
  misc_feature (20)..(20): Phosphorothioate or Phosphorodithioate 3'-Internucleotide Linkage (optionally present)
  misc_feature (1). .(19): ribonucleotide unmodified or modified as described for this sequence
uaccccuccccgcgccgactt

SEQ ID NO: 254 - RNA, 21 nt, Artificial Sequence
  Description of Artificial Sequence: Target Sequence/siNA antisense region (stab35)
  misc_feature (4)..(11): 2'-deoxy-2'Fluoro
  misc_feature (12)..(12): 2'-O-methyl
  misc_feature (13)..(13): 2'-deoxy-2'Fluoro
  misc_feature (14)..(14): 2'-O-methyl
  misc_feature (15)..(16): 2'-deoxy-2'Fluoro
  misc_feature (17)..(18): 2'-O-methyl
  misc_feature (19)..(19): 2'-deoxy-2'Fluoro
  misc_feature (20)..(21): 2'-O-methyl
uaccccuccccgcgccgacuu

SEQ ID NO: 255 - RNA, 21 nt, Artificial Sequence
  Description of Artificial Sequence: Target Sequence/siNA antisense region (stab36)
  misc_feature (4)..(11): 2'-deoxy-2'Fluoro
  misc_feature (12)..(12): 2'-O-methyl
  misc_feature (13)..(13): 2'-deoxy-2'Fluoro
  misc_feature (14)..(14): 2'-O-methyl
  misc_feature (15)..(16): 2'-deoxy-2'Fluoro
  misc_feature (17)..(18): 2'-O-methyl
  misc_feature (19)..(19): 2'-deoxy-2'Fluoro
  misc_feature (20)..(21): 2'-O-methyl
uaccccuccccgcgccgacuu

SEQ ID NO: 256 - RNA, 19 nt, Artificial Sequence
  Description of Artificial Sequence: Target Sequence/siNA sense region
agggccaacggccuggacg

SEQ ID NO: 257 - RNA, 19 nt, Artificial Sequence
  Description of Artificial Sequence: Target Sequence/siNA antisense region
cguccaggccguuggcccu

SEQ ID NO: 258 - DNA, 21 bp, Artificial Sequence
  Description of Artificial Sequence: Target Sequence/siNA sense region (stab00)
  misc_feature (1)..(19): ribonucleotide unmodified or modified as described for this sequence
agggccaacggccuggacgtt

SEQ ID NO: 259 - DNA, 21 bp, Artificial Sequence
  Description of Artificial Sequence: Target Sequence/siNA antisense region (stab00as)
  misc_feature (1)..(19): ribonucleotide unmodified or modified as described for this sequence
cguccaggccguuggcccutt

SEQ ID NO: 260 - DNA, 21 bp, Artificial Sequence
  Description of Artificial Sequence: Target Sequence/siNA sense region (stab04)
  misc_feature (1)..(1): 5'-3 attached terminal deoxyabasic moiety, inverted abasic, inverted nucleotide or other terminal cap that is optionally present
  misc_feature (21)..(21): 3'-3 attached terminal deoxyabasic moiety, inverted abasic, inverted nucleotide or other terminal cap that is optionally present
  misc_feature (5)..(6): 2'-deoxy-2'Fluoro
  misc_feature (9)..(9): 2'-deoxy-2'Fluoro
  misc_feature (12)..(14): 2'-deoxy-2'Fluoro
  misc_feature (18)..(18): 2'-deoxy-2'Fluoro
  misc_feature (1). .(19): ribonucleotide unmodified or modified as described for this sequence
agggccaacggccuggacgtt

SEQ ID NO: 261 - DNA, 21 bp, Artificial Sequence
  Description of Artificial Sequence: Target Sequence/siNA antisense region (stab05)
  misc_feature (1)..(1): 2'-deoxy-2'Fluoro
  misc_feature (3)..(5): 2'-deoxy-2'Fluoro
  misc_feature (9)..(10): 2'-deoxy-2'Fluoro
  misc_feature (12)..(13): 2'-deoxy-2'Fluoro
  misc_feature (16)..(19): 2'-deoxy-2'Fluoro
  misc_feature (20)..(20): Phosphorothioate or Phosphorodithioate 3'-Internucleotide Linkage (optionally present)
  misc_feature (1). .(19): ribonucleotide unmodified or modified as described for this sequence
cguccaggccguuggcccutt

SEQ ID NO: 262 - DNA, 21 bp, Artificial Sequence
  Description of Artificial Sequence: Target Sequence/siNA sense region (stab07)
  misc_feature (1)..(1): 5'-3 attached terminal deoxyabasic moiety, inverted abasic, inverted nucleotide or other terminal cap that is optionally present
  misc_feature (21)..(21): 3'-3 attached terminal deoxyabasic moiety, inverted abasic, inverted nucleotide or other terminal cap that is optionally present
  misc_feature (5)..(6): 2'-deoxy-2'Fluoro
  misc_feature (9)..(9): 2'-deoxy-2'Fluoro
  misc_feature (12)..(14): 2'-deoxy-2'Fluoro
  misc_feature (18)..(18): 2'-deoxy-2'Fluoro
  misc_feature (1)..(19): ribonucleotide unmodified or modified as described for this sequence
agggccaacggccuggacgtt

SEQ ID NO: 263 - DNA, 21 bp, Artificial Sequence
  Description of Artificial Sequence: Target Sequence/siNA antisense region (stab08)
  misc_feature (1)..(1): 2'-deoxy-2'Fluoro
  misc_feature (2)..(2): 2'-O-methyl
  misc_feature (3)..(5): 2'-deoxy-2'Fluoro
  misc_feature (6)..(8): 2'-O-methyl
  misc_feature (9)..(10): 2'-deoxy-2'Fluoro
  misc_feature (11)..(11): 2'-O-methyl
  misc_feature (12)..(13): 2'-deoxy-2'Fluoro
  misc_feature (14)..(15): 2'-O-methyl
  misc_feature (16)..(19): 2'-deoxy-2'Fluoro
  misc_feature (20)..(20): Phosphorothioate or Phosphorodithioate 3'-Internucleotide Linkage (optionally present)
  misc_feature (1)..(19): ribonucleotide unmodified or modified as described for this sequence
cguccaggccguuggcccutt

SEQ ID NO: 264 - DNA, 21 bp, Artificial Sequence
  Description of Artificial Sequence: Target Sequence/siNA sense region (stab09)
  misc_feature (1)..(1): 5'-3 attached terminal deoxyabasic moiety, inverted abasic, inverted nucleotide or other terminal cap that is optionally present
  misc_feature (21)..(21): 3'-3 attached terminal deoxyabasic moiety, inverted abasic, inverted nucleotide or other terminal cap that is optionally present
  misc_feature (1)..(19): ribonucleotide unmodified or modified as described for this sequence
agggccaacggccuggacgtt

SEQ ID NO: 265 - DNA, 21 bp, Artificial Sequence
  Description of Artificial Sequence: Target Sequence/siNA antisense region (stab10)
  misc_feature (20)..(20): Phosphorothioate or Phosphorodithioate 3'-Internucleotide Linkage (optionally present)
  misc_feature (1)..(19): ribonucleotide unmodified or modified as described for this sequence
cguccaggccguuggcccutt

SEQ ID NO: 266 - DNA, 21 bp, Artificial Sequence
  Description of Artificial Sequence: Target Sequence/siNA antisense region (stab19)
  misc_feature (21)..(21): 3'-3 attached terminal deoxyabasic moiety, inverted abasic, inverted nucleotide or other terminal cap that is optionally present
  misc_feature (1)..(1): 2'-deoxy-2'Fluoro
  misc_feature (2)..(2): 2'-O-methyl
  misc_feature (3)..(5): 2'-deoxy-2'Fluoro
  misc_feature (6)..(8): 2'-O-methyl
  misc_feature (9)..(10): 2'-deoxy-2'Fluoro
  misc_feature (11)..(11): 2'-O-methyl
  misc_feature (12)..(13): 2'-deoxy-2'Fluoro
  misc_feature (14)..(15): 2'-O-methyl
  misc_feature (16)..(19): 2'-deoxy-2'Fluoro
  misc_feature (1)..(19): ribonucleotide unmodified or modified as described for this sequence
cguccaggccguuggcccutt

SEQ ID NO: 267 - DNA, 21 bp, Artificial Sequence
  Description of Artificial Sequence: Target Sequence/siNA antisense region (stab22)
  misc_feature (21)..(21): 3'-3 attached terminal deoxyabasic moiety, inverted abasic, inverted nucleotide or other terminal cap that is optionally present
  misc_feature (20)..(20): Phosphorothioate or Phosphorodithioate 3'-Internucleotide Linkage (optionally present)
  misc_feature (1)..(19): ribonucleotide unmodified or modified as described for this sequence
cguccaggccguuggcccutt

SEQ ID NO: 268 - DNA, 21 bp, Artificial Sequence
  Description of Artificial Sequence: Target Sequence/siNA antisense region (stab25)
  misc_feature (4)..(5): 2'-deoxy-2'Fluoro
  misc_feature (6)..(8): 2'-O-methyl
  misc_feature (9)..(10): 2'-deoxy-2'Fluoro
  misc_feature (11)..(11): 2'-O-methyl
  misc_feature (12)..(13): 2'-deoxy-2'Fluoro
  misc_feature (14)..(15): 2'-O-methyl
  misc_feature (16)..(19): 2'-deoxy-2'Fluoro
  misc_feature (20)..(20): Phosphorothioate or Phosphorodithioate 3'-Internucleotide Linkage (optionally present)
  misc_feature (1)..(19): ribonucleotide unmodified or modified as described for this sequence
cguccaggccguuggcccutt

SEQ ID NO: 269 - RNA, 21 nt, Artificial Sequence
  Description of Artificial Sequence: Target Sequence/siNA antisense region (stab35)
  misc_feature (4)..(5): 2'-deoxy-2'Fluoro
  misc_feature (6)..(8): 2'-O-methyl
  misc_feature (9)..(10): 2'-deoxy-2'Fluoro
  misc_feature (11)..(11): 2'-O-methyl
  misc_feature (12)..(13): 2'-deoxy-2'Fluoro
  misc_feature (14)..(15): 2'-O-methyl
  misc_feature (16)..(19): 2'-deoxy-2'Fluoro
  misc_feature (20)..(21): 2'-O-methyl
cguccaggccguuggcccuuu

SEQ ID NO: 270 - RNA, 21 nt, Artificial Sequence
  Description of Artificial Sequence: Target Sequence/siNA antisense region (stab36)
  misc_feature (4)..(5): 2'-deoxy-2'Fluoro
  misc_feature (6)..(8): 2'-O-methyl
  misc_feature (9)..(10): 2'-deoxy-2'Fluoro
  misc_feature (11)..(11): 2'-O-methyl
  misc_feature (12)..(13): 2'-deoxy-2'Fluoro
  misc_feature (14)..(15): 2'-O-methyl
  misc_feature (16)..(19): 2'-deoxy-2'Fluoro
  misc_feature (20)..(21): 2'-O-methyl
cguccaggccguuggcccuac

SEQ ID NO: 271 - RNA, 19 nt, Artificial Sequence
  Description of Artificial Sequence: Target Sequence/siNA sense region
gccccaagggcgggcgcag

SEQ ID NO: 272 - RNA, 19 nt, Artificial Sequence
  Description of Artificial Sequence: Target Sequence/siNA antisense region
cugcgcccgcccuuggggc

SEQ ID NO: 273 - DNA, 21 bp, Artificial Sequence
  Description of Artificial Sequence: Target Sequence/siNA sense region (stab00)
  misc_feature (1)..(19): ribonucleotide unmodified or modified as described for this sequence
gccccaagggcgggcgcagtt

SEQ ID NO: 274 - DNA, 21 bp, Artificial Sequence
  Description of Artificial Sequence: Target Sequence/siNA antisense region (stab00as)
  misc_feature (1)..(19): ribonucleotide unmodified or modified as described for this sequence
cugcgcccgcccuuggggctt

SEQ ID NO: 275 - DNA, 21 bp, Artificial Sequence
  Description of Artificial Sequence: Target Sequence/siNA sense region (stab04)
  misc_feature (1)..(1): 5'-3 attached terminal deoxyabasic moiety, inverted abasic, inverted nucleotide or other terminal cap that is optionally present
  misc_feature (21)..(21): 3'-3 attached terminal deoxyabasic moiety, inverted abasic, inverted nucleotide or other terminal cap that is optionally present
  misc_feature (2)..(5): 2'-deoxy-2'Fluoro
  misc_feature (11)..(11): 2'-deoxy-2'Fluoro
  misc_feature (15)..(15): 2'-deoxy-2'Fluoro
  misc_feature (17)..(17): 2'-deoxy-2'Fluoro
  misc_feature (1). .(19): ribonucleotide unmodified or modified as described for this sequence
gccccaagggcgggcgcagtt

SEQ ID NO: 276 - DNA, 21 bp, Artificial Sequence
  Description of Artificial Sequence: Target Sequence/siNA antisense region (stab05)
  misc_feature (1)..(2): 2'-deoxy-2'Fluoro
  misc_feature (4)..(4): 2'-deoxy-2'Fluoro
  misc_feature (6)..(8): 2'-deoxy-2'Fluoro
  misc_feature (10)..(14): 2'-deoxy-2'Fluoro
  misc_feature (19)..(19): 2'-deoxy-2'Fluoro
  misc_feature (20)..(20): Phosphorothioate or Phosphorodithioate 3'-Internucleotide Linkage (optionally present)
  misc_feature (1). .(19): ribonucleotide unmodified or modified as described for this sequence
cugcgcccgcccuuggggctt

SEQ ID NO: 277 - DNA, 21 bp, Artificial Sequence
  Description of Artificial Sequence: Target Sequence/siNA sense region (stab07)
  misc_feature (1)..(1): 5'-3 attached terminal deoxyabasic moiety, inverted abasic, inverted nucleotide or other terminal cap that is optionally present
  misc_feature (21)..(21): 3'-3 attached terminal deoxyabasic moiety, inverted abasic, inverted nucleotide or other terminal cap that is optionally present
  misc_feature (2)..(5): 2'-deoxy-2'Fluoro
  misc_feature (11)..(11): 2'-deoxy-2'Fluoro
  misc_feature (15)..(15): 2'-deoxy-2'Fluoro
  misc_feature (17)..(17): 2'-deoxy-2'Fluoro
  misc_feature (1)..(19): ribonucleotide unmodified or modified as described for this sequence
gccccaagggcgggcgcagtt

SEQ ID NO: 278 - DNA, 21 bp, Artificial Sequence
  Description of Artificial Sequence: Target Sequence/siNA antisense region (stab08)
  misc_feature (1)..(2): 2'-deoxy-2'Fluoro
  misc_feature (3)..(3): 2'-O-methyl
  misc_feature (4)..(4): 2'-deoxy-2'Fluoro
  misc_feature (5)..(5): 2'-O-methyl
  misc_feature (6)..(8): 2'-deoxy-2'Fluoro
  misc_feature (9)..(9): 2'-O-methyl
  misc_feature (10)..(14): 2'-deoxy-2'Fluoro
  misc_feature (15)..(18): 2'-O-methyl
  misc_feature (19)..(19): 2'-deoxy-2'Fluoro
  misc_feature (20)..(20): Phosphorothioate or Phosphorodithioate 3'-Internucleotide Linkage (optionally present)
  misc_feature (1)..(19): ribonucleotide unmodified or modified as described for this sequence
cugcgcccgcccuuggggctt

SEQ ID NO: 279 - DNA, 21 bp, Artificial Sequence
  Description of Artificial Sequence: Target Sequence/siNA sense region (stab09)
  misc_feature (1)..(1): 5'-3 attached terminal deoxyabasic moiety, inverted abasic, inverted nucleotide or other terminal cap that is optionally present
  misc_feature (21)..(21): 3'-3 attached terminal deoxyabasic moiety, inverted abasic, inverted nucleotide or other terminal cap that is optionally present
  misc_feature (1)..(19): ribonucleotide unmodified or modified as described for this sequence
gccccaagggcgggcgcagtt

SEQ ID NO: 280 - DNA, 21 bp, Artificial Sequence
  Description of Artificial Sequence: Target Sequence/siNA antisense region (stab10)
  misc_feature (20)..(20): Phosphorothioate or Phosphorodithioate 3'-Internucleotide Linkage (optionally present)
  misc_feature (1)..(19): ribonucleotide unmodified or modified as described for this sequence
cugcgcccgcccuuggggctt

SEQ ID NO: 281 - DNA, 21 bp, Artificial Sequence
  Description of Artificial Sequence: Target Sequence/siNA antisense region (stab19)
  misc_feature (21)..(21): 3'-3 attached terminal deoxyabasic moiety, inverted abasic, inverted nucleotide or other terminal cap that is optionally present
  misc_feature (1)..(2): 2'-deoxy-2'Fluoro
  misc_feature (3)..(3): 2'-O-methyl
  misc_feature (4)..(4): 2'-deoxy-2'Fluoro
  misc_feature (5)..(5): 2'-O-methyl
  misc_feature (6)..(8): 2'-deoxy-2'Fluoro
  misc_feature (9)..(9): 2'-O-methyl
  misc_feature (10)..(14): 2'-deoxy-2'Fluoro
  misc_feature (15)..(18): 2'-O-methyl
  misc_feature (19)..(19): 2'-deoxy-2'Fluoro
  misc_feature (1)..(19): ribonucleotide unmodified or modified as described for this sequence
cugcgcccgcccuuggggctt

SEQ ID NO: 282 - DNA, 21 bp, Artificial Sequence
  Description of Artificial Sequence: Target Sequence/siNA antisense region (stab22)
  misc_feature (21)..(21): 3'-3 attached terminal deoxyabasic moiety, inverted abasic, inverted nucleotide or other terminal cap that is optionally present
  misc_feature (20)..(20): Phosphorothioate or Phosphorodithioate 3'-Internucleotide Linkage (optionally present)
  misc_feature (1)..(19): ribonucleotide unmodified or modified as described for this sequence
cugcgcccgcccuuggggctt

SEQ ID NO: 283 - DNA, 21 bp, Artificial Sequence
  Description of Artificial Sequence: Target Sequence/siNA antisense region (stab25)
  misc_feature (4)..(4): 2'-deoxy-2'Fluoro
  misc_feature (5)..(5): 2'-O-methyl
  misc_feature (6)..(8): 2'-deoxy-2'Fluoro
  misc_feature (9)..(9): 2'-O-methyl
  misc_feature (10)..(14): 2'-deoxy-2'Fluoro
  misc_feature (15)..(18): 2'-O-methyl
  misc_feature (19)..(19): 2'-deoxy-2'Fluoro
  misc_feature (20)..(20): Phosphorothioate or Phosphorodithioate 3'-Internucleotide Linkage (optionally present)
  misc_feature (1). .(19): ribonucleotide unmodified or modified as described for this sequence
cugcgcccgcccuuggggctt

SEQ ID NO: 284 - RNA, 21 nt, Artificial Sequence
  Description of Artificial Sequence: Target Sequence/siNA antisense region (stab35)
  misc_feature (4)..(4): 2'-deoxy-2'Fluoro
  misc_feature (5)..(5): 2'-O-methyl
  misc_feature (6)..(8): 2'-deoxy-2'Fluoro
  misc_feature (9)..(9): 2'-O-methyl
  misc_feature (10)..(14): 2'-deoxy-2'Fluoro
  misc_feature (15)..(18): 2'-O-methyl
  misc_feature (19)..(19): 2'-deoxy-2'Fluoro
  misc_feature (20)..(21): 2'-O-methyl
cugcgcccgcccuuggggcuu

SEQ ID NO: 285 - RNA, 21 nt, Artificial Sequence
  Description of Artificial Sequence: Target Sequence/siNA antisense region (stab36)
  misc_feature (4)..(4): 2'-deoxy-2'Fluoro
  misc_feature (5)..(5): 2'-O-methyl
  misc_feature (6)..(8): 2'-deoxy-2'Fluoro
  misc_feature (9)..(9): 2'-O-methyl
  misc_feature (10)..(14): 2'-deoxy-2'Fluoro
  misc_feature (15)..(18): 2'-O-methyl
  misc_feature (19)..(19): 2'-deoxy-2'Fluoro
  misc_feature (20)..(21): 2'-O-methyl
cugcgcccgcccuuggggcgu

SEQ ID NO: 286 - RNA, 19 nt, Artificial Sequence
  Description of Artificial Sequence: Target Sequence/siNA sense region
gaucgcggagccauggauu

SEQ ID NO: 287 - RNA, 19 nt, Artificial Sequence
  Description of Artificial Sequence: Target Sequence/siNA antisense region
aauccauggcuccgcgauc

SEQ ID NO: 288 - DNA, 21 bp, Artificial Sequence
  Description of Artificial Sequence: Target Sequence/siNA sense region (stab00)
  misc_feature (1)..(19): ribonucleotide unmodified or modified as described for this sequence
gaucgcggagccauggauutt

SEQ ID NO: 289 - DNA, 21 bp, Artificial Sequence
  Description of Artificial Sequence: Target Sequence/siNA antisense region (stab00as)
  misc_feature (1)..(19): ribonucleotide unmodified or modified as described for this sequence
aauccauggcuccgcgauctt

SEQ ID NO: 290 - DNA, 21 bp, Artificial Sequence
  Description of Artificial Sequence: Target Sequence/siNA sense region (stab04)
  misc_feature (1)..(1): 5'-3 attached terminal deoxyabasic moiety, inverted abasic, inverted nucleotide or other terminal cap that is optionally present
  misc_feature (21)..(21): 3'-3 attached terminal deoxyabasic moiety, inverted abasic, inverted nucleotide or other terminal cap that is optionally present
  misc_feature (3)..(4): 2'-deoxy-2'Fluoro
  misc_feature (6)..(6): 2'-deoxy-2'Fluoro
  misc_feature (11)..(12): 2'-deoxy-2'Fluoro
  misc_feature (14)..(14): 2'-deoxy-2'Fluoro
  misc_feature (18)..(19): 2'-deoxy-2'Fluoro
  misc_feature (1). .(19): ribonucleotide unmodified or modified as described for this sequence
gaucgcggagccauggauutt

SEQ ID NO: 291 - DNA, 21 bp, Artificial Sequence
  Description of Artificial Sequence: Target Sequence/siNA antisense region (stab05)
  misc_feature (3)..(5): 2'-deoxy-2'Fluoro
  misc_feature (7)..(7): 2'-deoxy-2'Fluoro
  misc_feature (10)..(13): 2'-deoxy-2'Fluoro
  misc_feature (15)..(15): 2'-deoxy-2'Fluoro
  misc_feature (18)..(19): 2'-deoxy-2'Fluoro
  misc_feature (20)..(20): Phosphorothioate or Phosphorodithioate 3'-Internucleotide Linkage (optionally present)
  misc_feature (1). .(19): ribonucleotide unmodified or modified as described for this sequence
aauccauggcuccgcgauctt

SEQ ID NO: 292 - DNA, 21 bp, Artificial Sequence
  Description of Artificial Sequence: Target Sequence/siNA sense region (stab07)
  misc_feature (1)..(1): 5'-3 attached terminal deoxyabasic moiety, inverted abasic, inverted nucleotide or other terminal cap that is optionally present
  misc_feature (21)..(21): 3'-3 attached terminal deoxyabasic moiety, inverted abasic, inverted nucleotide or other terminal cap that is optionally present
  misc_feature (3)..(4): 2'-deoxy-2'Fluoro
  misc_feature (6)..(6): 2'-deoxy-2'Fluoro
  misc_feature (11)..(12): 2'-deoxy-2'Fluoro
  misc_feature (14)..(14): 2'-deoxy-2'Fluoro
  misc_feature (18)..(19): 2'-deoxy-2'Fluoro
  misc_feature (1)..(19): ribonucleotide unmodified or modified as described for this sequence
gaucgcggagccauggauutt

SEQ ID NO: 293 - DNA, 21 bp, Artificial Sequence
  Description of Artificial Sequence: Target Sequence/siNA antisense region (stab08)
  misc_feature (1)..(2): 2'-O-methyl
  misc_feature (3)..(5): 2'-deoxy-2'Fluoro
  misc_feature (6)..(6): 2'-O-methyl
  misc_feature (7)..(7): 2'-deoxy-2'Fluoro
  misc_feature (8)..(9): 2'-O-methyl
  misc_feature (10)..(13): 2'-deoxy-2'Fluoro
  misc_feature (14)..(14): 2'-O-methyl
  misc_feature (15)..(15): 2'-deoxy-2'Fluoro
  misc_feature (16)..(17): 2'-O-methyl
  misc_feature (18)..(19): 2'-deoxy-2'Fluoro
  misc_feature (20)..(20): Phosphorothioate or Phosphorodithioate 3'-Internucleotide Linkage (optionally present)
  misc_feature (1)..(19): ribonucleotide unmodified or modified as described for this sequence
aauccauggcuccgcgauctt

SEQ ID NO: 294 - DNA, 21 bp, Artificial Sequence
  Description of Artificial Sequence: Target Sequence/siNA sense region (stab09)
  misc_feature (1)..(1): 5'-3 attached terminal deoxyabasic moiety, inverted abasic, inverted nucleotide or other terminal cap that is optionally present
  misc_feature (21)..(21): 3'-3 attached terminal deoxyabasic moiety, inverted abasic, inverted nucleotide or other terminal cap that is optionally present
  misc_feature (1)..(19): ribonucleotide unmodified or modified as described for this sequence
gaucgcggagccauggauutt

SEQ ID NO: 295 - DNA, 21 bp, Artificial Sequence
  Description of Artificial Sequence: Target Sequence/siNA antisense region (stab10)
  misc_feature (20)..(20): Phosphorothioate or Phosphorodithioate 3'-Internucleotide Linkage (optionally present)
  misc_feature (1)..(19): ribonucleotide unmodified or modified as described for this sequence
aauccauggcuccgcgauctt

SEQ ID NO: 296 - DNA, 21 bp, Artificial Sequence
  Description of Artificial Sequence: Target Sequence/siNA antisense region (stab19)
  misc_feature (21)..(21): 3'-3 attached terminal deoxyabasic moiety, inverted abasic, inverted nucleotide or other terminal cap that is optionally present
  misc_feature (1)..(2): 2'-O-methyl
  misc_feature (3)..(5): 2'-deoxy-2'Fluoro
  misc_feature (6)..(6): 2'-O-methyl
  misc_feature (7)..(7): 2'-deoxy-2'Fluoro
  misc_feature (8)..(9): 2'-O-methyl
  misc_feature (10)..(13): 2'-deoxy-2'Fluoro
  misc_feature (14)..(14): 2'-O-methyl
  misc_feature (15)..(15): 2'-deoxy-2'Fluoro
  misc_feature (16)..(17): 2'-O-methyl
  misc_feature (18)..(19): 2'-deoxy-2'Fluoro
  misc_feature (1)..(19): ribonucleotide unmodified or modified as described for this sequence
aauccauggcuccgcgauctt

SEQ ID NO: 297 - DNA, 21 bp, Artificial Sequence
  Description of Artificial Sequence: Target Sequence/siNA antisense region (stab22)
  misc_feature (21)..(21): 3'-3 attached terminal deoxyabasic moiety, inverted abasic, inverted nucleotide or other terminal cap that is optionally present
  misc_feature (20)..(20): Phosphorothioate or Phosphorodithioate 3'-Internucleotide Linkage (optionally present)
  misc_feature (1)..(19): ribonucleotide unmodified or modified as described for this sequence
aauccauggcuccgcgauctt

SEQ ID NO: 298 - DNA, 21 bp, Artificial Sequence
  Description of Artificial Sequence: Target Sequence/siNA antisense region (stab25)
  misc_feature (4)..(5): 2'-deoxy-2'Fluoro
  misc_feature (6)..(6): 2'-O-methyl
  misc_feature (7)..(7): 2'-deoxy-2'Fluoro
  misc_feature (8)..(9): 2'-O-methyl
  misc_feature (10)..(13): 2'-deoxy-2'Fluoro
  misc_feature (14)..(14): 2'-O-methyl
  misc_feature (15)..(15): 2'-deoxy-2'Fluoro
  misc_feature (16)..(17): 2'-O-methyl
  misc_feature (18)..(19): 2'-deoxy-2'Fluoro
  misc_feature (20)..(20): Phosphorothioate or Phosphorodithioate 3'-Internucleotide Linkage (optionally present)
  misc_feature (1). .(19): ribonucleotide unmodified or modified as described for this sequence
aauccauggcuccgcgauctt

SEQ ID NO: 299 - RNA, 21 nt, Artificial Sequence
  Description of Artificial Sequence: Target Sequence/siNA antisense region (stab35)
  misc_feature (4)..(5): 2'-deoxy-2'Fluoro
  misc_feature (6)..(6): 2'-O-methyl
  misc_feature (7)..(7): 2'-deoxy-2'Fluoro
  misc_feature (8)..(9): 2'-O-methyl
  misc_feature (10)..(13): 2'-deoxy-2'Fluoro
  misc_feature (14)..(14): 2'-O-methyl
  misc_feature (15)..(15): 2'-deoxy-2'Fluoro
  misc_feature (16)..(17): 2'-O-methyl
  misc_feature (18)..(19): 2'-deoxy-2'Fluoro
  misc_feature (20)..(21): 2'-O-methyl
aauccauggcuccgcgaucuu

SEQ ID NO: 300 - RNA, 21 nt, Artificial Sequence
  Description of Artificial Sequence: Target Sequence/siNA antisense region (stab36)
  misc_feature (4)..(5): 2'-deoxy-2'Fluoro
  misc_feature (6)..(6): 2'-O-methyl
  misc_feature (7)..(7): 2'-deoxy-2'Fluoro
  misc_feature (8)..(9): 2'-O-methyl
  misc_feature (10)..(13): 2'-deoxy-2'Fluoro
  misc_feature (14)..(14): 2'-O-methyl
  misc_feature (15)..(15): 2'-deoxy-2'Fluoro
  misc_feature (16)..(17): 2'-O-methyl
  misc_feature (18)..(19): 2'-deoxy-2'Fluoro
  misc_feature (20)..(21): 2'-O-methyl
aauccauggcuccgcgaucug

SEQ ID NO: 301 - RNA, 19 nt, Artificial Sequence
  Description of Artificial Sequence: Target Sequence/siNA sense region
ugcacuuucgaagacaugc

SEQ ID NO: 302 - RNA, 19 nt, Artificial Sequence
  Description of Artificial Sequence: Target Sequence/siNA antisense region
gcaugucuucgaaagugca

SEQ ID NO: 303 - DNA, 21 bp, Artificial Sequence
  Description of Artificial Sequence: Target Sequence/siNA sense region (stab00)
  misc_feature (1)..(19): ribonucleotide unmodified or modified as described for this sequence
ugcacuuucgaagacaugctt

SEQ ID NO: 304 - DNA, 21 bp, Artificial Sequence
  Description of Artificial Sequence: Target Sequence/siNA antisense region (stab00as)
  misc_feature (1)..(19): ribonucleotide unmodified or modified as described for this sequence
gcaugucuucgaaagugcatt

SEQ ID NO: 305 - DNA, 21 bp, Artificial Sequence
  Description of Artificial Sequence: Target Sequence/siNA sense region (stab04)
  misc_feature (1)..(1): 5'-3 attached terminal deoxyabasic moiety, inverted abasic, inverted nucleotide or other terminal cap that is optionally present
  misc_feature (21)..(21): 3'-3 attached terminal deoxyabasic moiety, inverted abasic, inverted nucleotide or other terminal cap that is optionally present
  misc_feature (1)..(1): 2'-deoxy-2'Fluoro
  misc_feature (3)..(3): 2'-deoxy-2'Fluoro
  misc_feature (5)..(9): 2'-deoxy-2'Fluoro
  misc_feature (15)..(15): 2'-deoxy-2'Fluoro
  misc_feature (17)..(17): 2'-deoxy-2'Fluoro
  misc_feature (19)..(19): 2'-deoxy-2'Fluoro
  misc_feature (1). .(19): ribonucleotide unmodified or modified as described for this sequence
ugcacuuucgaagacaugctt

SEQ ID NO: 306 - DNA, 21 bp, Artificial Sequence
  Description of Artificial Sequence: Target Sequence/siNA antisense region (stab05)
  misc_feature (2)..(2): 2'-deoxy-2'Fluoro
  misc_feature (4)..(4): 2'-deoxy-2'Fluoro
  misc_feature (6)..(10): 2'-deoxy-2'Fluoro
  misc_feature (16)..(16): 2'-deoxy-2'Fluoro
  misc_feature (18)..(18): 2'-deoxy-2'Fluoro
  misc_feature (20)..(20): Phosphorothioate or Phosphorodithioate 3'-Internucleotide Linkage (optionally present)
  misc_feature (1). .(19): ribonucleotide unmodified or modified as described for this sequence
gcaugucuucgaaagugcatt

SEQ ID NO: 307 - DNA, 21 bp, Artificial Sequence
  Description of Artificial Sequence: Target Sequence/siNA sense region (stab07)
  misc_feature (1)..(1): 5'-3 attached terminal deoxyabasic moiety, inverted abasic, inverted nucleotide or other terminal cap that is optionally present
  misc_feature (21)..(21): 3'-3 attached terminal deoxyabasic moiety, inverted abasic, inverted nucleotide or other terminal cap that is optionally present
  misc_feature (1)..(1): 2'-deoxy-2'Fluoro
  misc_feature (3)..(3): 2'-deoxy-2'Fluoro
  misc_feature (5)..(9): 2'-deoxy-2'Fluoro
  misc_feature (15)..(15): 2'-deoxy-2'Fluoro
  misc_feature (17)..(17): 2'-deoxy-2'Fluoro
  misc_feature (19)..(19): 2'-deoxy-2'Fluoro
  misc_feature (1)..(19): ribonucleotide unmodified or modified as described for this sequence e
ugcacuuucgaagacaugctt

SEQ ID NO: 308 - DNA, 21 bp, Artificial Sequence
  Description of Artificial Sequence: Target Sequence/siNA antisense region (stab08)
  misc_feature (1)..(1): 2'-O-methyl
  misc_feature (2)..(2): 2'-deoxy-2'Fluoro
  misc_feature (3)..(3): 2'-O-methyl
  misc_feature (4)..(4): 2'-deoxy-2'Fluoro
  misc_feature (5)..(5): 2'-O-methyl
  misc_feature (6)..(10): 2'-deoxy-2'Fluoro
  misc_feature (11)..(15): 2'-O-methyl
  misc_feature (16)..(16): 2'-deoxy-2'Fluoro
  misc_feature (17)..(17): 2'-O-methyl
  misc_feature (18)..(18): 2'-deoxy-2'Fluoro
  misc_feature (19)..(19): 2'-O-methyl
  misc_feature (20)..(20): Phosphorothioate or Phosphorodithioate 3'-Internucleotide Linkage (optionally present)
  misc_feature (1)..(19): ribonucleotide unmodified or modified as described for this sequence
gcaugucuucgaaagugcatt

SEQ ID NO: 309 - DNA, 21 bp, Artificial Sequence
  Description of Artificial Sequence: Target Sequence/siNA sense region (stab09)
  misc_feature (1)..(1): 5'-3 attached terminal deoxyabasic moiety, inverted abasic, inverted nucleotide or other terminal cap that is optionally present
  misc_feature (21)..(21): 3'-3 attached terminal deoxyabasic moiety, inverted abasic, inverted nucleotide or other terminal cap that is optionally present
  misc_feature (1)..(19): ribonucleotide unmodified or modified as described for this sequence
ugcacuuucgaagacaugctt

SEQ ID NO: 310 - DNA, 21 bp, Artificial Sequence
  Description of Artificial Sequence: Target Sequence/siNA antisense region (stab10)
  misc_feature (20)..(20): Phosphorothioate or Phosphorodithioate 3'-Internucleotide Linkage (optionally present)
  misc_feature (1)..(19): ribonucleotide unmodified or modified as described for this sequence
gcaugucuucgaaagugcatt

SEQ ID NO: 311 - DNA, 21 bp, Artificial Sequence
  Description of Artificial Sequence: Target Sequence/siNA antisense region (stab19)
  misc_feature (21)..(21): 3'-3 attached terminal deoxyabasic moiety, inverted abasic, inverted nucleotide or other terminal cap that is optionally present
  misc_feature (1)..(1): 2'-O-methyl
  misc_feature (2)..(2): 2'-deoxy-2'Fluoro
  misc_feature (3)..(3): 2'-O-methyl
  misc_feature (4)..(4): 2'-deoxy-2'Fluoro
  misc_feature (5)..(5): 2'-O-methyl
  misc_feature (6)..(10): 2'-deoxy-2'Fluoro
  misc_feature (11)..(15): 2'-O-methyl
  misc_feature (16)..(16): 2'-deoxy-2'Fluoro
  misc_feature (17)..(17): 2'-O-methyl
  misc_feature (18)..(18): 2'-deoxy-2'Fluoro
  misc_feature (19)..(19): 2'-O-methyl
  misc_feature (1)..(19): ribonucleotide unmodified or modified as described for this sequence
gcaugucuucgaaagugcatt

SEQ ID NO: 312 - DNA, 21 bp, Artificial Sequence
  Description of Artificial Sequence: Target Sequence/siNA antisense region (stab22)
  misc_feature (21)..(21): 3'-3 attached terminal deoxyabasic moiety, inverted abasic, inverted nucleotide or other terminal cap that is optionally present
  misc_feature (20)..(20): Phosphorothioate or Phosphorodithioate 3'-Internucleotide Linkage (optionally present)
  misc_feature (1)..(19): ribonucleotide unmodified or modified as described for this sequence
gcaugucuucgaaagugcatt

SEQ ID NO: 313 - DNA, 21 bp, Artificial Sequence
  Description of Artificial Sequence: Target Sequence/siNA antisense region (stab25)
  misc_feature (4)..(4): 2'-deoxy-2'Fluoro
  misc_feature (5)..(5): 2'-O-methyl
  misc_feature (6)..(10): 2'-deoxy-2'Fluoro
  misc_feature (11)..(15): 2'-O-methyl
  misc_feature (16)..(16): 2'-deoxy-2'Fluoro
  misc_feature (17)..(17): 2'-O-methyl
  misc_feature (18)..(18): 2'-deoxy-2'Fluoro
  misc_feature (19)..(19): 2'-O-methyl
  misc_feature (20)..(20): Phosphorothioate or Phosphorodithioate 3'-Internucleotide Linkage (optionally present)
  misc_feature (1). .(19): ribonucleotide unmodified or modified as described for this sequence
gcaugucuucgaaagugcatt

SEQ ID NO: 314 - RNA, 21 nt, Artificial Sequence
  Description of Artificial Sequence: Target Sequence/siNA antisense region (stab35)
  misc_feature (4)..(4): 2'-deoxy-2'Fluoro
  misc_feature (5)..(5): 2'-O-methyl
  misc_feature (6)..(10): 2'-deoxy-2'Fluoro
  misc_feature (11)..(15): 2'-O-methyl
  misc_feature (16)..(16): 2'-deoxy-2'Fluoro
  misc_feature (17)..(17): 2'-O-methyl
  misc_feature (18)..(18): 2'-deoxy-2'Fluoro
  misc_feature (19)..(21): 2'-O-methyl
gcaugucuucgaaagugcauu

SEQ ID NO: 315 - RNA, 21 nt, Artificial Sequence
  Description of Artificial Sequence: Target Sequence/siNA antisense region (stab36)
  misc_feature (4)..(4): 2'-deoxy-2'Fluoro
  misc_feature (5)..(5): 2'-O-methyl
  misc_feature (6)..(10): 2'-deoxy-2'Fluoro
  misc_feature (11)..(15): 2'-O-methyl
  misc_feature (16)..(16): 2'-deoxy-2'Fluoro
  misc_feature (17)..(17): 2'-O-methyl
  misc_feature (18)..(18): 2'-deoxy-2'Fluoro
  misc_feature (19)..(21): 2'-O-methyl
gcaugucuucgaaagugcaau

SEQ ID NO: 316 - RNA, 19 nt, Artificial Sequence
  Description of Artificial Sequence: Target Sequence/siNA sense region
cuucagcuuaucaacaacc

SEQ ID NO: 317 - RNA, 19 nt, Artificial Sequence
  Description of Artificial Sequence: Target Sequence/siNA antisense region
gguuguugauaagcugaag

SEQ ID NO: 318 - DNA, 21 bp, Artificial Sequence
  Description of Artificial Sequence: Target Sequence/siNA sense region (stab00)
cuucagcuuaucaacaacctt

SEQ ID NO: 319 - DNA, 21 bp, Artificial Sequence
  Description of Artificial Sequence: Target Sequence/siNA antisense region (stab00as)
  misc_feature (1)..(19): ribonucleotide unmodified or modified as described for this sequence
gguuguugauaagcugaagtt

SEQ ID NO: 320 - DNA, 21 bp, Artificial Sequence
  Description of Artificial Sequence: Target Sequence/siNA sense region (stab04)
  misc_feature (1)..(1): 5'-3 attached terminal deoxyabasic moiety, inverted abasic, inverted nucleotide or other terminal cap that is optionally present
  misc_feature (21)..(21): 3'-3 attached terminal deoxyabasic moiety, inverted abasic, inverted nucleotide or other terminal cap that is optionally present
  misc_feature (1)..(4): 2'-deoxy-2'Fluoro
  misc_feature (7)..(9): 2'-deoxy-2'Fluoro
  misc_feature (11)..(12): 2'-deoxy-2'Fluoro
  misc_feature (15)..(15): 2'-deoxy-2'Fluoro
  misc_feature (18)..(19): 2'-deoxy-2'Fluoro
  misc_feature (1). .(19): ribonucleotide unmodified or modified as described for this sequence
cuucagcuuaucaacaacctt

SEQ ID NO: 321 - DNA, 21 bp, Artificial Sequence
  Description of Artificial Sequence: Target Sequence/siNA antisense region (stab05)
  misc_feature (3)..(4): 2'-deoxy-2'Fluoro
  misc_feature (6)..(7): 2'-deoxy-2'Fluoro
  misc_feature (10)..(10): 2'-deoxy-2'Fluoro
  misc_feature (14)..(15): 2'-deoxy-2'Fluoro
  misc_feature (20)..(20): Phosphorothioate or Phosphorodithioate 3'-Internucleotide Linkage (optionally present)
  misc_feature (1). .(19): ribonucleotide unmodified or modified as described for this sequence
gguuguugauaagcugaagtt

SEQ ID NO: 322 - DNA, 21 bp, Artificial Sequence
  Description of Artificial Sequence: Target Sequence/siNA sense region (stab07)
  misc_feature (1)..(1): 5'-3 attached terminal deoxyabasic moiety, inverted abasic, inverted nucleotide or other terminal cap that is optionally present
  misc_feature (21)..(21): 3'-3 attached terminal deoxyabasic moiety, inverted abasic, inverted nucleotide or other terminal cap that is optionally present
  misc_feature (1)..(4): 2'-deoxy-2'Fluoro
  misc_feature (7)..(9): 2'-deoxy-2'Fluoro
  misc_feature (11)..(12): 2'-deoxy-2'Fluoro
  misc_feature (15)..(15): 2'-deoxy-2'Fluoro
  misc_feature (18)..(19): 2'-deoxy-2'Fluoro
  misc_feature (1)..(19): ribonucleotide unmodified or modified as described for this sequence
cuucagcuuaucaacaacctt

SEQ ID NO: 323 - DNA, 21 bp, Artificial Sequence
  Description of Artificial Sequence: Target Sequence/siNA antisense region (stab08)
  misc_feature (1)..(2): 2'-O-methyl
  misc_feature (3)..(4): 2'-deoxy-2'Fluoro
  misc_feature (5)..(5): 2'-O-methyl
  misc_feature (6)..(7): 2'-deoxy-2'Fluoro
  misc_feature (8)..(9): 2'-O-methyl
  misc_feature (10)..(10): 2'-deoxy-2'Fluoro
  misc_feature (11)..(13): 2'-O-methyl
  misc_feature (14)..(15): 2'-deoxy-2'Fluoro
  misc_feature (16)..(19): 2'-O-methyl
  misc_feature (20)..(20): Phosphorothioate or Phosphorodithioate 3'-Internucleotide Linkage (optionally present)
  misc_feature (1)..(19): ribonucleotide unmodified or modified as described for this sequence
gguuguugauaagcugaagtt

SEQ ID NO: 324 - DNA, 21 bp, Artificial Sequence
  Description of Artificial Sequence: Target Sequence/siNA sense region (stab09)
  misc_feature (1)..(1): 5'-3 attached terminal deoxyabasic moiety, inverted abasic, inverted nucleotide or other terminal cap that is optionally present
  misc_feature (21)..(21): 3'-3 attached terminal deoxyabasic moiety, inverted abasic, inverted nucleotide or other terminal cap that is optionally present
  misc_feature (1)..(19): ribonucleotide unmodified or modified as described for this sequence
cuucagcuuaucaacaacctt

SEQ ID NO: 325 - DNA, 21 bp, Artificial Sequence
  Description of Artificial Sequence: Target Sequence/siNA antisense region (stab10)
  misc_feature (20)..(20): Phosphorothioate or Phosphorodithioate 3'-Internucleotide Linkage (optionally present)
  misc_feature (1)..(19): ribonucleotide unmodified or modified as described for this sequence
gguuguugauaagcugaagtt

SEQ ID NO: 326 - DNA, 21 bp, Artificial Sequence
  Description of Artificial Sequence: Target Sequence/siNA antisense region (stab19)
  misc_feature (21)..(21): 3'-3 attached terminal deoxyabasic moiety, inverted abasic, inverted nucleotide or other terminal cap that is optionally present
  misc_feature (1)..(2): 2'-O-methyl
  misc_feature (3)..(4): 2'-deoxy-2'Fluoro
  misc_feature (5)..(5): 2'-O-methyl
  misc_feature (6)..(7): 2'-deoxy-2'Fluoro
  misc_feature (8)..(9): 2'-O-methyl
  misc_feature (10)..(10): 2'-deoxy-2'Fluoro
  misc_feature (11)..(13): 2'-O-methyl
  misc_feature (14)..(15): 2'-deoxy-2'Fluoro
  misc_feature (16)..(19): 2'-O-methyl
  misc_feature (1)..(19): ribonucleotide unmodified or modified as described for this sequence
gguuguugauaagcugaagtt

SEQ ID NO: 327 - DNA, 21 bp, Artificial Sequence
  Description of Artificial Sequence: Target Sequence/siNA antisense region (stab22)
  misc_feature (21)..(21): 3'-3 attached terminal deoxyabasic moiety, inverted abasic, inverted nucleotide or other terminal cap that is optionally present
  misc_feature (20)..(20): Phosphorothioate or Phosphorodithioate 3'-Internucleotide Linkage (optionally present)
  misc_feature (1)..(19): ribonucleotide unmodified or modified as described for this sequence
gguuguugauaagcugaagtt

SEQ ID NO: 328 - DNA, 21 bp, Artificial Sequence
  Description of Artificial Sequence: Target Sequence/siNA antisense region (stab25)
  misc_feature (4)..(4): 2'-deoxy-2'Fluoro
  misc_feature (5)..(5): 2'-O-methyl
  misc_feature (6)..(7): 2'-deoxy-2'Fluoro
  misc_feature (8)..(9): 2'-O-methyl
  misc_feature (10)..(10): 2'-deoxy-2'Fluoro
  misc_feature (11)..(13): 2'-O-methyl
  misc_feature (14)..(15): 2'-deoxy-2'Fluoro
  misc_feature (16)..(19): 2'-O-methyl
  misc_feature (20)..(20): Phosphorothioate or Phosphorodithioate 3'-Internucleotide Linkage (optionally present)
  misc_feature (1)..(19): ribonucleotide unmodified or modified as described for this sequence
gguuguugauaagcugaagtt

SEQ ID NO: 329 - RNA, 21 nt, Artificial Sequence
  Description of Artificial Sequence: Target Sequence/siNA antisense region (stab35)
  misc_feature (4)..(4): 2'-deoxy-2'Fluoro
  misc_feature (5)..(5): 2'-O-methyl
  misc_feature (6)..(7): 2'-deoxy-2'Fluoro
  misc_feature (8)..(9): 2'-O-methyl
  misc_feature (10)..(10): 2'-deoxy-2'Fluoro
  misc_feature (11)..(13): 2'-O-methyl
  misc_feature (14)..(15): 2'-deoxy-2'Fluoro
  misc_feature (16)..(21): 2'-O-methyl
gguuguugauaagcugaaguu

SEQ ID NO: 330 - RNA, 21 nt, Artificial Sequence
  Description of Artificial Sequence: Target Sequence/siNA antisense region (stab36)
  misc_feature (4)..(4): 2'-deoxy-2'Fluoro
  misc_feature (5)..(5): 2'-O-methyl
  misc_feature (6)..(7): 2'-deoxy-2'Fluoro
  misc_feature (8)..(9): 2'-O-methyl
  misc_feature (10)..(10): 2'-deoxy-2'Fluoro
  misc_feature (11)..(13): 2'-O-methyl
  misc_feature (14)..(15): 2'-deoxy-2'Fluoro
  misc_feature (16)..(21): 2'-O-methyl
gguuguugauaagcugaagca

SEQ ID NO: 331 - RNA, 19 nt, Artificial Sequence
  Description of Artificial Sequence: Target Sequence/siNA sense region
caagacagugacuucccug

SEQ ID NO: 332 - RNA, 19 nt, Artificial Sequence
  Description of Artificial Sequence: Target Sequence/siNA antisense region
cagggaagucacugucuug

SEQ ID NO: 333 - DNA, 21 bp, Artificial Sequence
  Description of Artificial Sequence: Target Sequence/siNA sense region (stab00)
  misc_feature (1)..(19): ribonucleotide unmodified or modified as described for this sequence
caagacagugacuucccugtt

SEQ ID NO: 334 - DNA, 21 bp, Artificial Sequence
  Description of Artificial Sequence: Target Sequence/siNA antisense region (stab00as)
  misc_feature (1)..(19): ribonucleotide unmodified or modified as described for this sequence
cagggaagucacugucuugtt

SEQ ID NO: 335 - DNA, 21 bp, Artificial Sequence
  Description of Artificial Sequence: Target Sequence/siNA sense region (stab04)
  misc_feature (1)..(1): 5'-3 attached terminal deoxyabasic moiety, inverted abasic, inverted nucleotide or other terminal cap that is optionally present
  misc_feature (21)..(21): 3'-3 attached terminal deoxyabasic moiety, inverted abasic, inverted nucleotide or other terminal cap that is optionally present
  misc_feature (1)..(1): 2'-deoxy-2'Fluoro
  misc_feature (6)..(6): 2'-deoxy-2'Fluoro
  misc_feature (9)..(9): 2'-deoxy-2'Fluoro
  misc_feature (12)..(18): 2'-deoxy-2'Fluoro
  misc_feature (1). .(19): ribonucleotide unmodified or modified as described for this sequence
caagacagugacuucccugtt

SEQ ID NO: 336 - DNA, 21 bp, Artificial Sequence
  Description of Artificial Sequence: Target Sequence/siNA antisense region (stab05)
  misc_feature (1)..(1): 2'-deoxy-2'Fluoro
  misc_feature (9)..(10): 2'-deoxy-2'Fluoro
  misc_feature (12)..(13): 2'-deoxy-2'Fluoro
  misc_feature (15)..(18): 2'-deoxy-2'Fluoro
  misc_feature (20)..(20): Phosphorothioate or Phosphorodithioate 3'-Internucleotide Linkage (optionally present)
  misc_feature (1). .(19): ribonucleotide unmodified or modified as described for this sequence
cagggaagucacugucuugtt

SEQ ID NO: 337 - DNA, 21 bp, Artificial Sequence
  Description of Artificial Sequence: Target Sequence/siNA sense region (stab07)
  misc_feature (1)..(1): 5'-3 attached terminal deoxyabasic moiety, inverted abasic, inverted nucleotide or other terminal cap that is optionally present
  misc_feature (21)..(21): 3'-3 attached terminal deoxyabasic moiety, inverted abasic, inverted nucleotide or other terminal cap that is optionally present
  misc_feature (1)..(1): 2'-deoxy-2'Fluoro
  misc_feature (6)..(6): 2'-deoxy-2'Fluoro
  misc_feature (9)..(9): 2'-deoxy-2'Fluoro
  misc_feature (12)..(18): 2'-deoxy-2'Fluoro
  misc_feature (1)..(19): ribonucleotide unmodified or modified as described for this sequence
caagacagugacuucccugtt

SEQ ID NO: 338 - DNA, 21 bp, Artificial Sequence
  Description of Artificial Sequence: Target Sequence/siNA antisense region (stab08)
  misc_feature (1)..(1): 2'-deoxy-2'Fluoro
  misc_feature (2)..(8): 2'-O-methyl
  misc_feature (9)..(10): 2'-deoxy-2'Fluoro
  misc_feature (11)..(11): 2'-O-methyl
  misc_feature (12)..(13): 2'-deoxy-2'Fluoro
  misc_feature (14)..(14): 2'-O-methyl
  misc_feature (15)..(18): 2'-deoxy-2'Fluoro
  misc_feature (19)..(19): 2'-O-methyl
  misc_feature (20)..(20): Phosphorothioate or Phosphorodithioate 3'-Internucleotide Linkage (optionally present)
  misc_feature (1)..(19): ribonucleotide unmodified or modified as described for this sequence
cagggaagucacugucuugtt

SEQ ID NO: 339 - DNA, 21 bp, Artificial Sequence
  Description of Artificial Sequence: Target Sequence/siNA sense region (stab09)
  misc_feature (1)..(1): 5'-3 attached terminal deoxyabasic moiety, inverted abasic, inverted nucleotide or other terminal cap that is optionally present
  misc_feature (21)..(21): 3'-3 attached terminal deoxyabasic moiety, inverted abasic, inverted nucleotide or other terminal cap that is optionally present
  misc_feature (1)..(19): ribonucleotide unmodified or modified as described for this sequence
caagacagugacuucccugtt

SEQ ID NO: 340 - DNA, 21 bp, Artificial Sequence
  Description of Artificial Sequence: Target Sequence/siNA antisense region (stab10)
  misc_feature (20)..(20): Phosphorothioate or Phosphorodithioate 3'-Internucleotide Linkage (optionally present)
  misc_feature (1)..(19): ribonucleotide unmodified or modified as described for this sequence
cagggaagucacugucuugtt

SEQ ID NO: 341 - DNA, 21 bp, Artificial Sequence
  Description of Artificial Sequence: Target Sequence/siNA antisense region (stab19)
  misc_feature (21)..(21): 3'-3 attached terminal deoxyabasic moiety, inverted abasic, inverted nucleotide or other terminal cap that is optionally present
  misc_feature (1)..(1): 2'-deoxy-2'Fluoro
  misc_feature (2)..(8): 2'-O-methyl
  misc_feature (9)..(10): 2'-deoxy-2'Fluoro
  misc_feature (11)..(11): 2'-O-methyl
  misc_feature (12)..(13): 2'-deoxy-2'Fluoro
  misc_feature (14)..(14): 2'-O-methyl
  misc_feature (15)..(18): 2'-deoxy-2'Fluoro
  misc_feature (19)..(19): 2'-O-methyl
  misc_feature (1)..(19): ribonucleotide unmodified or modified as described for this sequence
cagggaagucacugucuugtt

SEQ ID NO: 342 - DNA, 21 bp, Artificial Sequence
  Description of Artificial Sequence: Target Sequence/siNA antisense region (stab22)
  misc_feature (21)..(21): 3'-3 attached terminal deoxyabasic moiety, inverted abasic, inverted nucleotide or other terminal cap that is optionally present
  misc_feature (20)..(20): Phosphorothioate or Phosphorodithioate 3'-Internucleotide Linkage (optionally present)
  misc_feature (1)..(19): ribonucleotide unmodified or modified as described for this sequence
cagggaagucacugucuugtt

SEQ ID NO: 343 - DNA, 21 bp, Artificial Sequence
  Description of Artificial Sequence: Target Sequence/siNA antisense region (stab25)
  misc_feature (4)..(8): 2'-O-methyl
  misc_feature (9)..(10): 2'-deoxy-2'Fluoro
  misc_feature (11)..(11): 2'-O-methyl
  misc_feature (12)..(13): 2'-deoxy-2'Fluoro
  misc_feature (14)..(14): 2'-O-methyl
  misc_feature (15)..(18): 2'-deoxy-2'Fluoro
  misc_feature (19)..(19): 2'-O-methyl
  misc_feature (20)..(20): Phosphorothioate or Phosphorodithioate 3'-Internucleotide Linkage (optionally present)
  misc_feature (1). .(19): ribonucleotide unmodified or modified as described for this sequence
cagggaagucacugucuugtt

SEQ ID NO: 344 - RNA, 21 nt, Artificial Sequence
  Description of Artificial Sequence: Target Sequence/siNA antisense region (stab35)
  misc_feature (4)..(8): 2'-O-methyl
  misc_feature (9)..(10): 2'-deoxy-2'Fluoro
  misc_feature (11)..(11): 2'-O-methyl
  misc_feature (12)..(13): 2'-deoxy-2'Fluoro
  misc_feature (14)..(14): 2'-O-methyl
  misc_feature (15)..(18): 2'-deoxy-2'Fluoro
  misc_feature (19)..(21): 2'-O-methyl
cagggaagucacugucuuguu

SEQ ID NO: 345 - RNA, 21 nt, Artificial Sequence
  Description of Artificial Sequence: Target Sequence/siNA antisense region (stab36)
  misc_feature (4)..(8): 2'-O-methyl
  misc_feature (9)..(10): 2'-deoxy-2'Fluoro
  misc_feature (11)..(11): 2'-O-methyl
  misc_feature (12)..(13): 2'-deoxy-2'Fluoro
  misc_feature (14)..(14): 2'-O-methyl
  misc_feature (15)..(18): 2'-deoxy-2'Fluoro
  misc_feature (19)..(21): 2'-O-methyl
cagggaagucacugucuuggu

SEQ ID NO: 346 - RNA, 19 nt, Artificial Sequence
  Description of Artificial Sequence: Target Sequence/siNA sense region
ggccuauuugacccacccu

SEQ ID NO: 347 - RNA, 19 nt, Artificial Sequence
  Description of Artificial Sequence: Target Sequence/siNA antisense region
agggugggucaaauaggcc

SEQ ID NO: 348 - DNA, 21 bp, Artificial Sequence
  Description of Artificial Sequence: Target Sequence/siNA sense region (stab00)
  misc_feature (1)..(19): ribonucleotide unmodified or modified as described for this sequence
ggccuauuugacccacccutt

SEQ ID NO: 349 - DNA, 21 bp, Artificial Sequence
  Description of Artificial Sequence: Target Sequence/siNA antisense region (stab00as)
  misc_feature (1)..(19): ribonucleotide unmodified or modified as described for this sequence
agggugggucaaauaggcctt

SEQ ID NO: 350 - DNA, 21 bp, Artificial Sequence
  Description of Artificial Sequence: Target Sequence/siNA sense region (stab04)
  misc_feature (1)..(1): 5'-3 attached terminal deoxyabasic moiety, inverted abasic, inverted nucleotide or other terminal cap that is optionally present
  misc_feature (21)..(21): 3'-3 attached terminal deoxyabasic moiety, inverted abasic, inverted nucleotide or other terminal cap that is optionally present
  misc_feature (3)..(5): 2'-deoxy-2'Fluoro
  misc_feature (7)..(9): 2'-deoxy-2'Fluoro
  misc_feature (12)..(14): 2'-deoxy-2'Fluoro
  misc_feature (16)..(19): 2'-deoxy-2'Fluoro
  misc_feature (1). .(19): ribonucleotide unmodified or modified as described for this sequence
ggccuauuugacccacccutt

SEQ ID NO: 351 - DNA, 21 bp, Artificial Sequence
  Description of Artificial Sequence: Target Sequence/siNA antisense region (stab05)
  misc_feature (5)..(5): 2'-deoxy-2'Fluoro
  misc_feature (9)..(10): 2'-deoxy-2'Fluoro
  misc_feature (14)..(14): 2'-deoxy-2'Fluoro
  misc_feature (18)..(19): 2'-deoxy-2'Fluoro
  misc_feature (20)..(20): Phosphorothioate or Phosphorodithioate 3'-Internucleotide Linkage (optionally present)
  misc_feature (1). .(19): ribonucleotide unmodified or modified as described for this sequence
agggugggucaaauaggcctt

SEQ ID NO: 352 - DNA, 21 bp, Artificial Sequence
  Description of Artificial Sequence: Target Sequence/siNA sense region (stab07)
  misc_feature (1)..(1): 5'-3 attached terminal deoxyabasic moiety, inverted abasic, inverted nucleotide or other terminal cap that is optionally present
  misc_feature (21)..(21): 3'-3 attached terminal deoxyabasic moiety, inverted abasic, inverted nucleotide or other terminal cap that is optionally present
  misc_feature (3)..(5): 2'-deoxy-2'Fluoro
  misc_feature (7)..(9): 2'-deoxy-2'Fluoro
  misc_feature (12)..(14): 2'-deoxy-2'Fluoro
  misc_feature (16)..(19): 2'-deoxy-2'Fluoro
  misc_feature (1)..(19): ribonucleotide unmodified or modified as described for this sequence
ggccuauuugacccacccutt

SEQ ID NO: 353 - DNA, 21 bp, Artificial Sequence
  Description of Artificial Sequence: Target Sequence/siNA antisense region (stab08)
  misc_feature (1)..(4): 2'-O-methyl
  misc_feature (5)..(5): 2'-deoxy-2'Fluoro
  misc_feature (6)..(8): 2'-O-methyl
  misc_feature (9)..(10): 2'-deoxy-2'Fluoro
  misc_feature (11)..(13): 2'-O-methyl
  misc_feature (14)..(14): 2'-deoxy-2'Fluoro
  misc_feature (15)..(17): 2'-O-methyl
  misc_feature (18)..(19): 2'-deoxy-2'Fluoro
  misc_feature (20)..(20): Phosphorothioate or Phosphorodithioate 3'-Internucleotide Linkage (optionally present)
  misc_feature (1)..(19): ribonucleotide unmodified or modified as described for this sequence
agggugggucaaauaggcctt

SEQ ID NO: 354 - DNA, 21 bp, Artificial Sequence
  Description of Artificial Sequence: Target Sequence/siNA sense region (stab09)
  misc_feature (1)..(1): 5'-3 attached terminal deoxyabasic moiety, inverted abasic, inverted nucleotide or other terminal cap that is optionally present
  misc_feature (21)..(21): 3'-3 attached terminal deoxyabasic moiety, inverted abasic, inverted nucleotide or other terminal cap that is optionally present
  misc_feature (1)..(19): ribonucleotide unmodified or modified as described for this sequence
ggccuauuugacccacccutt

SEQ ID NO: 355 - DNA, 21 bp, Artificial Sequence
  Description of Artificial Sequence: Target Sequence/siNA antisense region (stab10)
  misc_feature (20)..(20): Phosphorothioate or Phosphorodithioate 3'-Internucleotide Linkage (optionally present)
  misc_feature (1)..(19): ribonucleotide unmodified or modified as described for this sequence
agggugggucaaauaggcctt

SEQ ID NO: 356 - DNA, 21 bp, Artificial Sequence
  Description of Artificial Sequence: Target Sequence/siNA antisense region (stab19)
  misc_feature (21)..(21): 3'-3 attached terminal deoxyabasic moiety, inverted abasic, inverted nucleotide or other terminal cap that is optionally present
  misc_feature (1)..(4): 2'-O-methyl
  misc_feature (5)..(5): 2'-deoxy-2'Fluoro
  misc_feature (6)..(8): 2'-O-methyl
  misc_feature (9)..(10): 2'-deoxy-2'Fluoro
  misc_feature (11)..(13): 2'-O-methyl
  misc_feature (14)..(14): 2'-deoxy-2'Fluoro
  misc_feature (15)..(17): 2'-O-methyl
  misc_feature (18)..(19): 2'-deoxy-2'Fluoro
  misc_feature (1)..(19): ribonucleotide unmodified or modified as described for this sequence
agggugggucaaauaggcctt

SEQ ID NO: 357 - DNA, 21 bp, Artificial Sequence
  Description of Artificial Sequence: Target Sequence/siNA antisense region (stab22)
  misc_feature (21)..(21): 3'-3 attached terminal deoxyabasic moiety, inverted abasic, inverted nucleotide or other terminal cap that is optionally present
  misc_feature (20)..(20): Phosphorothioate or Phosphorodithioate 3'-Internucleotide Linkage (optionally present)
  misc_feature (1)..(19): ribonucleotide unmodified or modified as described for this sequence
agggugggucaaauaggcctt

SEQ ID NO: 358 - DNA, 21 bp, Artificial Sequence
  Description of Artificial Sequence: Target Sequence/siNA antisense region (stab25)
  misc_feature (4)..(4): 2'-O-methyl
  misc_feature (5)..(5): 2'-deoxy-2'Fluoro
  misc_feature (6)..(8): 2'-O-methyl
  misc_feature (9)..(10): 2'-deoxy-2'Fluoro
  misc_feature (11)..(13): 2'-O-methyl
  misc_feature (14)..(14): 2'-deoxy-2'Fluoro
  misc_feature (15)..(17): 2'-O-methyl
  misc_feature (18)..(19): 2'-deoxy-2'Fluoro
  misc_feature (20)..(20): Phosphorothioate or Phosphorodithioate 3'-Internucleotide Linkage (optionally present)
  misc_feature (1). .(19): ribonucleotide unmodified or modified as described for this sequence
agggugggucaaauaggcctt

SEQ ID NO: 359 - RNA, 21 nt, Artificial Sequence
  Description of Artificial Sequence: Target Sequence/siNA antisense region (stab35)
  misc_feature (4)..(4): 2'-O-methyl
  misc_feature (5)..(5): 2'-deoxy-2'Fluoro
  misc_feature (6)..(8): 2'-O-methyl
  misc_feature (9)..(10): 2'-deoxy-2'Fluoro
  misc_feature (11)..(13): 2'-O-methyl
  misc_feature (14)..(14): 2'-deoxy-2'Fluoro
  misc_feature (15)..(17): 2'-O-methyl
  misc_feature (18)..(19): 2'-deoxy-2'Fluoro
  misc_feature (20)..(21): 2'-O-methyl
agggugggucaaauaggccuu

SEQ ID NO: 360 - RNA, 21 nt, Artificial Sequence
  Description of Artificial Sequence: Target Sequence/siNA antisense region (stab36)
  misc_feature (4)..(4): 2'-O-methyl
  misc_feature (5)..(5): 2'-deoxy-2'Fluoro
  misc_feature (6)..(8): 2'-O-methyl
  misc_feature (9)..(10): 2'-deoxy-2'Fluoro
  misc_feature (11)..(13): 2'-O-methyl
  misc_feature (14)..(14): 2'-deoxy-2'Fluoro
  misc_feature (15)..(17): 2'-O-methyl
  misc_feature (18)..(19): 2'-deoxy-2'Fluoro
  misc_feature (20)..(21): 2'-O-methyl
agggugggucaaauaggccag

SEQ ID NO: 361 - RNA, 19 nt, Artificial Sequence
  Description of Artificial Sequence: Target Sequence/siNA sense region
uaugcugggaguggggcag

SEQ ID NO: 362 - RNA, 19 nt, Artificial Sequence
  Description of Artificial Sequence: Target Sequence/siNA antisense region
cugccccacucccagcaua

SEQ ID NO: 363 - DNA, 21 bp, Artificial Sequence
  Description of Artificial Sequence: Target Sequence/siNA sense region (stab00)
  misc_feature (1)..(19): ribonucleotide unmodified or modified as described for this sequence
uaugcugggaguggggcagtt

SEQ ID NO: 364 - DNA, 21 bp, Artificial Sequence
  Description of Artificial Sequence: Target Sequence/siNA antisense region (stab00as)
  misc_feature (1)..(19): ribonucleotide unmodified or modified as described for this sequence
cugccccacucccagcauatt

SEQ ID NO: 365 - DNA, 21 bp, Artificial Sequence
  Description of Artificial Sequence: Target Sequence/siNA sense region (stab04)
  misc_feature (1)..(1): 5'-3 attached terminal deoxyabasic moiety, inverted abasic, inverted nucleotide or other terminal cap that is optionally present
  misc_feature (21)..(21): 3'-3 attached terminal deoxyabasic moiety, inverted abasic, inverted nucleotide or other terminal cap that is optionally present
  misc_feature (1)..(1): 2'-deoxy-2'Fluoro
  misc_feature (3)..(3): 2'-deoxy-2'Fluoro
  misc_feature (5)..(6): 2'-deoxy-2'Fluoro
  misc_feature (12)..(12): 2'-deoxy-2'Fluoro
  misc_feature (17)..(17): 2'-deoxy-2'Fluoro
  misc_feature (1). .(19): ribonucleotide unmodified or modified as described for this sequence
uaugcugggaguggggcagtt

SEQ ID NO: 366 - DNA, 21 bp, Artificial Sequence
  Description of Artificial Sequence: Target Sequence/siNA antisense region (stab05)
  misc_feature (1)..(2): 2'-deoxy-2'Fluoro
  misc_feature (4)..(7): 2'-deoxy-2'Fluoro
  misc_feature (9)..(13): 2'-deoxy-2'Fluoro
  misc_feature (16)..(16): 2'-deoxy-2'Fluoro
  misc_feature (18)..(18): 2'-deoxy-2'Fluoro
  misc_feature (20)..(20): Phosphorothioate or Phosphorodithioate 3'-Internucleotide Linkage (optionally present)
  misc_feature (1). .(19): ribonucleotide unmodified or modified as described for this sequence
cugccccacucccagcauatt

SEQ ID NO: 367 - DNA, 21 bp, Artificial Sequence
  Description of Artificial Sequence: Target Sequence/siNA sense region (stab07)
  misc_feature (1)..(1): 5'-3 attached terminal deoxyabasic moiety, inverted abasic, inverted nucleotide or other terminal cap that is optionally present
  misc_feature (21)..(21): 3'-3 attached terminal deoxyabasic moiety, inverted abasic, inverted nucleotide or other terminal cap that is optionally present
  misc_feature (1)..(1): 2'-deoxy-2'Fluoro
  misc_feature (3)..(3): 2'-deoxy-2'Fluoro
  misc_feature (5)..(6): 2'-deoxy-2'Fluoro
  misc_feature (12)..(12): 2'-deoxy-2'Fluoro
  misc_feature (17)..(17): 2'-deoxy-2'Fluoro
  misc_feature (1)..(19): ribonucleotide unmodified or modified as described for this sequence
uaugcugggaguggggcagtt

SEQ ID NO: 368 - DNA, 21 bp, Artificial Sequence
  Description of Artificial Sequence: Target Sequence/siNA antisense region (stab08)
  misc_feature (1)..(2): 2'-deoxy-2'Fluoro
  misc_feature (3)..(3): 2'-O-methyl
  misc_feature (4)..(7): 2'-deoxy-2'Fluoro
  misc_feature (8)..(8): 2'-O-methyl
  misc_feature (9)..(13): 2'-deoxy-2'Fluoro
  misc_feature (14)..(15): 2'-O-methyl
  misc_feature (16)..(16): 2'-deoxy-2'Fluoro
  misc_feature (17)..(17): 2'-O-methyl
  misc_feature (18)..(18): 2'-deoxy-2'Fluoro
  misc_feature (19)..(19): 2'-O-methyl
  misc_feature (20)..(20): Phosphorothioate or Phosphorodithioate 3'-Internucleotide Linkage (optionally present)
  misc_feature (1)..(19): ribonucleotide unmodified or modified as described for this sequence
cugccccacucccagcauatt

SEQ ID NO: 369 - DNA, 21 bp, Artificial Sequence
  Description of Artificial Sequence: Target Sequence/siNA sense region (stab09)
  misc_feature (1)..(1): 5'-3 attached terminal deoxyabasic moiety, inverted abasic, inverted nucleotide or other terminal cap that is optionally present
  misc_feature (21)..(21): 3'-3 attached terminal deoxyabasic moiety, inverted abasic, inverted nucleotide or other terminal cap that is optionally present
  misc_feature (1)..(19): ribonucleotide unmodified or modified as described for this sequence
uaugcugggaguggggcagtt

SEQ ID NO: 370 - DNA, 21 bp, Artificial Sequence
  Description of Artificial Sequence: Target Sequence/siNA antisense region (stab10)
  misc_feature (20)..(20): Phosphorothioate or Phosphorodithioate 3'-Internucleotide Linkage (optionally present)
  misc_feature (1)..(19): ribonucleotide unmodified or modified as described for this sequence
cugccccacucccagcauatt

SEQ ID NO: 371 - DNA, 21 bp, Artificial Sequence
  Description of Artificial Sequence: Target Sequence/siNA antisense region (stab19)
  misc_feature (21)..(21): 3'-3 attached terminal deoxyabasic moiety, inverted abasic, inverted nucleotide or other terminal cap that is optionally present
  misc_feature (1)..(2): 2'-deoxy-2'Fluoro
  misc_feature (3)..(3): 2'-O-methyl
  misc_feature (4)..(7): 2'-deoxy-2'Fluoro
  misc_feature (8)..(8): 2'-O-methyl
  misc_feature (9)..(13): 2'-deoxy-2'Fluoro
  misc_feature (14)..(15): 2'-O-methyl
  misc_feature (16)..(16): 2'-deoxy-2'Fluoro
  misc_feature (17)..(17): 2'-O-methyl
  misc_feature (18)..(18): 2'-deoxy-2'Fluoro
  misc_feature (19)..(19): 2'-O-methyl
  misc_feature (1)..(19): ribonucleotide unmodified or modified as described for this sequence
cugccccacucccagcauatt

SEQ ID NO: 372 - DNA, 21 bp, Artificial Sequence
  Description of Artificial Sequence: Target Sequence/siNA antisense region (stab22)
  misc_feature (21)..(21): 3'-3 attached terminal deoxyabasic moiety, inverted abasic, inverted nucleotide or other terminal cap that is optionally present
  misc_feature (20)..(20): Phosphorothioate or Phosphorodithioate 3'-Internucleotide Linkage (optionally present)
  misc_feature (1)..(19): ribonucleotide unmodified or modified as described for this sequence
cugccccacucccagcauatt

SEQ ID NO: 373 - DNA, 21 bp, Artificial Sequence
  Description of Artificial Sequence: Target Sequence/siNA antisense region (stab25)
  misc_feature (4)..(7): 2'-deoxy-2'Fluoro
  misc_feature (8)..(8): 2'-O-methyl
  misc_feature (9)..(13): 2'-deoxy-2'Fluoro
  misc_feature (14)..(15): 2'-O-methyl
  misc_feature (16)..(16): 2'-deoxy-2'Fluoro
  misc_feature (17)..(17): 2'-O-methyl
  misc_feature (18)..(18): 2'-deoxy-2'Fluoro
  misc_feature (19)..(19): 2'-O-methyl
  misc_feature (20)..(20): Phosphorothioate or Phosphorodithioate 3'-Internucleotide Linkage (optionally present)
  misc_feature (1). .(19): ribonucleotide unmodified or modified as described for this sequence
cugccccacucccagcauatt

SEQ ID NO: 374 - RNA, 21 nt, Artificial Sequence
  Description of Artificial Sequence: Target Sequence/siNA antisense region (stab35)
  misc_feature (4)..(7): 2'-deoxy-2'Fluoro
  misc_feature (8)..(8): 2'-O-methyl
  misc_feature (9)..(13): 2'-deoxy-2'Fluoro
  misc_feature (14)..(15): 2'-O-methyl
  misc_feature (16)..(16): 2'-deoxy-2'Fluoro
  misc_feature (17)..(17): 2'-O-methyl
  misc_feature (18)..(18): 2'-deoxy-2'Fluoro
  misc_feature (19)..(21): 2'-O-methyl
cugccccacucccagcauauu

SEQ ID NO: 375 - RNA, 21 nt, Artificial Sequence
  Description of Artificial Sequence: Target Sequence/siNA antisense region (stab36)
  misc_feature (4)..(7): 2'-deoxy-2'Fluoro
  misc_feature (8)..(8): 2'-O-methyl
  misc_feature (9)..(13): 2'-deoxy-2'Fluoro
  misc_feature (14)..(15): 2'-O-methyl
  misc_feature (16)..(16): 2'-deoxy-2'Fluoro
  misc_feature (17)..(17): 2'-O-methyl
  misc_feature (18)..(18): 2'-deoxy-2'Fluoro
  misc_feature (19)..(21): 2'-O-methyl
cugccccacucccagcauagg

SEQ ID NO: 376 - RNA, 19 nt, Artificial Sequence
  Description of Artificial Sequence: Target Sequence/siNA sense region
gggggcacagacccugcca

SEQ ID NO: 377 - RNA, 19 nt, Artificial Sequence
  Description of Artificial Sequence: Target Sequence/siNA antisense region
uggcagggucugugccccc

SEQ ID NO: 378 - DNA, 21 bp, Artificial Sequence
  Description of Artificial Sequence: Target Sequence/siNA sense region (stab00)
  misc_feature (1)..(19): ribonucleotide unmodified or modified as described for this sequence
gggggcacagacccugccatt

SEQ ID NO: 379 - DNA, 21 bp, Artificial Sequence
  Description of Artificial Sequence: Target Sequence/siNA antisense region (stab00as)
  misc_feature (1)..(19): ribonucleotide unmodified or modified as described for this sequence
uggcagggucugugccccctt

SEQ ID NO: 380 - DNA, 21 bp, Artificial Sequence
  Description of Artificial Sequence: Target Sequence/siNA sense region (stab04)
  misc_feature (1)..(1): 5'-3 attached terminal deoxyabasic moiety, inverted abasic, inverted nucleotide or other terminal cap that is optionally present
  misc_feature (21)..(21): 3'-3 attached terminal deoxyabasic moiety, inverted abasic, inverted nucleotide or other terminal cap that is optionally present
  misc_feature (6)..(6): 2'-deoxy-2'Fluoro
  misc_feature (8)..(8): 2'-deoxy-2'Fluoro
  misc_feature (12)..(15): 2'-deoxy-2'Fluoro
  misc_feature (17)..(18): 2'-deoxy-2'Fluoro
  misc_feature (1). .(19): ribonucleotide unmodified or modified as described for this sequence
gggggcacagacccugccatt

SEQ ID NO: 381 - DNA, 21 bp, Artificial Sequence
  Description of Artificial Sequence: Target Sequence/siNA antisense region (stab05)
  misc_feature (1)..(1): 2'-deoxy-2'Fluoro
  misc_feature (4)..(4): 2'-deoxy-2'Fluoro
  misc_feature (9)..(11): 2'-deoxy-2'Fluoro
  misc_feature (13)..(13): 2'-deoxy-2'Fluoro
  misc_feature (15)..(19): 2'-deoxy-2'Fluoro
  misc_feature (20)..(20): Phosphorothioate or Phosphorodithioate 3'-Internucleotide Linkage (optionally present)
  misc_feature (1). .(19): ribonucleotide unmodified or modified as described for this sequence
uggcagggucugugccccctt

SEQ ID NO: 382 - DNA, 21 bp, Artificial Sequence
  Description of Artificial Sequence: Target Sequence/siNA sense region (stab07)
  misc_feature (1)..(1): 5'-3 attached terminal deoxyabasic moiety, inverted abasic, inverted nucleotide or other terminal cap that is optionally present
  misc_feature (21)..(21): 3'-3 attached terminal deoxyabasic moiety, inverted abasic, inverted nucleotide or other terminal cap that is optionally present
  misc_feature (6)..(6): 2'-deoxy-2'Fluoro
  misc_feature (8)..(8): 2'-deoxy-2'Fluoro
  misc_feature (12)..(15): 2'-deoxy-2'Fluoro
  misc_feature (17)..(18): 2'-deoxy-2'Fluoro
  misc_feature (1)..(19): ribonucleotide unmodified or modified as described for this sequence
gggggcacagacccugccatt

SEQ ID NO: 383 - DNA, 21 bp, Artificial Sequence
  Description of Artificial Sequence: Target Sequence/siNA antisense region (stab08)
  misc_feature (1)..(1): 2'-deoxy-2'Fluoro
  misc_feature (2)..(3): 2'-O-methyl
  misc_feature (4)..(4): 2'-deoxy-2'Fluoro
  misc_feature (5)..(8): 2'-O-methyl
  misc_feature (9)..(11): 2'-deoxy-2'Fluoro
  misc_feature (12)..(12): 2'-O-methyl
  misc_feature (13)..(13): 2'-deoxy-2'Fluoro
  misc_feature (14)..(14): 2'-O-methyl
  misc_feature (15)..(19): 2'-deoxy-2'Fluoro
  misc_feature (20)..(20): Phosphorothioate or Phosphorodithioate 3'-Internucleotide Linkage (optionally present)
  misc_feature (1)..(19): ribonucleotide unmodified or modified as described for this sequence
uggcagggucugugccccctt

SEQ ID NO: 384 - DNA, 21 bp, Artificial Sequence
  Description of Artificial Sequence: Target Sequence/siNA sense region (stab09)
  misc_feature (1)..(1): 5'-3 attached terminal deoxyabasic moiety, inverted abasic, inverted nucleotide or other terminal cap that is optionally present
  misc_feature (21)..(21): 3'-3 attached terminal deoxyabasic moiety, inverted abasic, inverted nucleotide or other terminal cap that is optionally present
  misc_feature (1)..(19): ribonucleotide unmodified or modified as described for this sequence
gggggcacagacccugccatt

SEQ ID NO: 385 - DNA, 21 bp, Artificial Sequence
  Description of Artificial Sequence: Target Sequence/siNA antisense region (stab10)
  misc_feature (20)..(20): Phosphorothioate or Phosphorodithioate 3'-Internucleotide Linkage (optionally present)
  misc_feature (1)..(19): ribonucleotide unmodified or modified as described for this sequence
uggcagggucugugccccctt

SEQ ID NO: 386 - DNA, 21 bp, Artificial Sequence
  Description of Artificial Sequence: Target Sequence/siNA antisense region (stab19)
  misc_feature (21)..(21): 3'-3 attached terminal deoxyabasic moiety, inverted abasic, inverted nucleotide or other terminal cap that is optionally present
  misc_feature (1)..(1): 2'-deoxy-2'Fluoro
  misc_feature (2)..(3): 2'-O-methyl
  misc_feature (4)..(4): 2'-deoxy-2'Fluoro
  misc_feature (5)..(8): 2'-O-methyl
  misc_feature (9)..(11): 2'-deoxy-2'Fluoro
  misc_feature (12)..(12): 2'-O-methyl
  misc_feature (13)..(13): 2'-deoxy-2'Fluoro
  misc_feature (14)..(14): 2'-O-methyl
  misc_feature (15)..(19): 2'-deoxy-2'Fluoro
  misc_feature (1)..(19): ribonucleotide unmodified or modified as described for this sequence
uggcagggucugugccccctt

SEQ ID NO: 387 - DNA, 21 bp, Artificial Sequence
  Description of Artificial Sequence: Target Sequence/siNA antisense region (stab22)
  misc_feature (21)..(21): 3'-3 attached terminal deoxyabasic moiety, inverted abasic, inverted nucleotide or other terminal cap that is optionally present
  misc_feature (20)..(20): Phosphorothioate or Phosphorodithioate 3'-Internucleotide Linkage (optionally present)
  misc_feature (1)..(19): ribonucleotide unmodified or modified as described for this sequence
uggcagggucugugccccctt

SEQ ID NO: 388 - DNA, 21 bp, Artificial Sequence
  Description of Artificial Sequence: Target Sequence/siNA antisense region (stab25)
  misc_feature (4)..(4): 2'-deoxy-2'Fluoro
  misc_feature (5)..(8): 2'-O-methyl
  misc_feature (9)..(11): 2'-deoxy-2'Fluoro
  misc_feature (12)..(12): 2'-O-methyl
  misc_feature (13)..(13): 2'-deoxy-2'Fluoro
  misc_feature (14)..(14): 2'-O-methyl
  misc_feature (15)..(19): 2'-deoxy-2'Fluoro
  misc_feature (20)..(20): Phosphorothioate or Phosphorodithioate 3'-Internucleotide Linkage (optionally present)
  misc_feature (1). .(19): ribonucleotide unmodified or modified as described for this sequence
uggcagggucugugccccctt

SEQ ID NO: 389 - RNA, 21 nt, Artificial Sequence
  Description of Artificial Sequence: Target Sequence/siNA antisense region (stab35)
  misc_feature (4)..(4): 2'-deoxy-2'Fluoro
  misc_feature (5)..(8): 2'-O-methyl
  misc_feature (9)..(11): 2'-deoxy-2'Fluoro
  misc_feature (12)..(12): 2'-O-methyl
  misc_feature (13)..(13): 2'-deoxy-2'Fluoro
  misc_feature (14)..(14): 2'-O-methyl
  misc_feature (15)..(19): 2'-deoxy-2'Fluoro
  misc_feature (20)..(21): 2'-O-methyl
uggcagggucugugcccccuu

SEQ ID NO: 390 - RNA, 21 nt, Artificial Sequence
  Description of Artificial Sequence: Target Sequence/siNA antisense region (stab36)
  misc_feature (4)..(4): 2'-deoxy-2'Fluoro
  misc_feature (5)..(8): 2'-O-methyl
  misc_feature (9)..(11): 2'-deoxy-2'Fluoro
  misc_feature (12)..(12): 2'-O-methyl
  misc_feature (13)..(13): 2'-deoxy-2'Fluoro
  misc_feature (14)..(14): 2'-O-methyl
  misc_feature (15)..(19): 2'-deoxy-2'Fluoro
  misc_feature (20)..(21): 2'-O-methyl
uggcagggucugugcccccug

SEQ ID NO: 391 - RNA, 19 nt, Artificial Sequence
  Description of Artificial Sequence: Target Sequence/siNA sense region
agccccgauaccagcuccc

SEQ ID NO: 392 - RNA, 19 nt, Artificial Sequence
  Description of Artificial Sequence: Target Sequence/siNA antisense region
gggagcugguaucggggcu

SEQ ID NO: 393 - DNA, 21 bp, Artificial Sequence
  Description of Artificial Sequence: Target Sequence/siNA sense region (stab00)
  misc_feature (1)..(19): ribonucleotide unmodified or modified as described for this sequence
agccccgauaccagcuccctt

SEQ ID NO: 394 - DNA, 21 bp, Artificial Sequence
  Description of Artificial Sequence: Target Sequence/siNA antisense region (stab00as)
  misc_feature (1)..(19): ribonucleotide unmodified or modified as described for this sequence
gggagcugguaucggggcutt

SEQ ID NO: 395 - DNA, 21 bp, Artificial Sequence
  Description of Artificial Sequence: Target Sequence/siNA sense region (stab04)
  misc_feature (1)..(1): 5'-3 attached terminal deoxyabasic moiety, inverted abasic, inverted nucleotide or other terminal cap that is optionally present
  misc_feature (21)..(21): 3'-3 attached terminal deoxyabasic moiety, inverted abasic, inverted nucleotide or other terminal cap that is optionally present
  misc_feature (3)..(6): 2'-deoxy-2'Fluoro
  misc_feature (9)..(9): 2'-deoxy-2'Fluoro
  misc_feature (11)..(12): 2'-deoxy-2'Fluoro
  misc_feature (15)..(19): 2'-deoxy-2'Fluoro
  misc_feature (1). .(19): ribonucleotide unmodified or modified as described for this sequence
agccccgauaccagcuccctt

SEQ ID NO: 396 - DNA, 21 bp, Artificial Sequence
  Description of Artificial Sequence: Target Sequence/siNA antisense region (stab05)
  misc_feature (6)..(7): 2'-deoxy-2'Fluoro
  misc_feature (10)..(10): 2'-deoxy-2'Fluoro
  misc_feature (12)..(13): 2'-deoxy-2'Fluoro
  misc_feature (18)..(19): 2'-deoxy-2'Fluoro
  misc_feature (20)..(20): Phosphorothioate or Phosphorodithioate 3'-Internucleotide Linkage (optionally present)
  misc_feature (1). .(19): ribonucleotide unmodified or modified as described for this sequence
gggagcugguaucggggcutt

SEQ ID NO: 397 - DNA, 21 bp, Artificial Sequence
  Description of Artificial Sequence: Target Sequence/siNA sense region (stab07)
  misc_feature (1)..(1): 5'-3 attached terminal deoxyabasic moiety, inverted abasic, inverted nucleotide or other terminal cap that is optionally present
  misc_feature (21)..(21): 3'-3 attached terminal deoxyabasic moiety, inverted abasic, inverted nucleotide or other terminal cap that is optionally present
  misc_feature (3)..(6): 2'-deoxy-2'Fluoro
  misc_feature (9)..(9): 2'-deoxy-2'Fluoro
  misc_feature (11)..(12): 2'-deoxy-2'Fluoro
  misc_feature (15)..(19): 2'-deoxy-2'Fluoro
  misc_feature (1)..(19): ribonucleotide unmodified or modified as described for this sequence
agccccgauaccagcuccctt

SEQ ID NO: 398 - DNA, 21 bp, Artificial Sequence
  Description of Artificial Sequence: Target Sequence/siNA antisense region (stab08)
  misc_feature (1)..(5): 2'-O-methyl
  misc_feature (6)..(7): 2'-deoxy-2'Fluoro
  misc_feature (8)..(9): 2'-O-methyl
  misc_feature (10)..(10): 2'-deoxy-2'Fluoro
  misc_feature (11)..(11): 2'-O-methyl
  misc_feature (12)..(13): 2'-deoxy-2'Fluoro
  misc_feature (14)..(17): 2'-O-methyl
  misc_feature (18)..(19): 2'-deoxy-2'Fluoro
  misc_feature (20)..(20): Phosphorothioate or Phosphorodithioate 3'-Internucleotide Linkage (optionally present)
  misc_feature (1)..(19): ribonucleotide unmodified or modified as described for this sequence
gggagcugguaucggggcutt

SEQ ID NO: 399 - DNA, 21 bp, Artificial Sequence
  Description of Artificial Sequence: Target Sequence/siNA sense region (stab09)
  misc_feature (1)..(1): 5'-3 attached terminal deoxyabasic moiety, inverted abasic, inverted nucleotide or other terminal cap that is optionally present
  misc_feature (21)..(21): 3'-3 attached terminal deoxyabasic moiety, inverted abasic, inverted nucleotide or other terminal cap that is optionally present
  misc_feature (1)..(19): ribonucleotide unmodified or modified as described for this sequence
agccccgauaccagcuccctt

SEQ ID NO: 400 - DNA, 21 bp, Artificial Sequence
  Description of Artificial Sequence: Target Sequence/siNA antisense region (stab10)
  misc_feature (20)..(20): Phosphorothioate or Phosphorodithioate 3'-Internucleotide Linkage (optionally present)
  misc_feature (1)..(19): ribonucleotide unmodified or modified as described for this sequence
gggagcugguaucggggcutt

SEQ ID NO: 401 - DNA, 21 bp, Artificial Sequence
  Description of Artificial Sequence: Target Sequence/siNA antisense region (stab19)
  misc_feature (21)..(21): 3'-3 attached terminal deoxyabasic moiety, inverted abasic, inverted nucleotide or other terminal cap that is optionally present
  misc_feature (1)..(5): 2'-O-methyl
  misc_feature (6)..(7): 2'-deoxy-2'Fluoro
  misc_feature (8)..(9): 2'-O-methyl
  misc_feature (10)..(10): 2'-deoxy-2'Fluoro
  misc_feature (11)..(11): 2'-O-methyl
  misc_feature (12)..(13): 2'-deoxy-2'Fluoro
  misc_feature (14)..(17): 2'-O-methyl
  misc_feature (18)..(19): 2'-deoxy-2'Fluoro
  misc_feature (1)..(19): ribonucleotide unmodified or modified as described for this sequence
gggagcugguaucggggcutt

SEQ ID NO: 402 - DNA, 21 bp, Artificial Sequence
  Description of Artificial Sequence: Target Sequence/siNA antisense region (stab22)
  misc_feature (21)..(21): 3'-3 attached terminal deoxyabasic moiety, inverted abasic, inverted nucleotide or other terminal cap that is optionally present
  misc_feature (20)..(20): Phosphorothioate or Phosphorodithioate 3'-Internucleotide Linkage (optionally present)
  misc_feature (1)..(19): ribonucleotide unmodified or modified as described for this sequence
gggagcugguaucggggcutt

SEQ ID NO: 403 - DNA, 21 bp, Artificial Sequence
  Description of Artificial Sequence: Target Sequence/siNA antisense region (stab25)
  misc_feature (4)..(5): 2'-O-methyl
  misc_feature (6)..(7): 2'-deoxy-2'Fluoro
  misc_feature (8)..(9): 2'-O-methyl
  misc_feature (10)..(10): 2'-deoxy-2'Fluoro
  misc_feature (11)..(11): 2'-O-methyl
  misc_feature (12)..(13): 2'-deoxy-2'Fluoro
  misc_feature (14)..(17): 2'-O-methyl
  misc_feature (18)..(19): 2'-deoxy-2'Fluoro
  misc_feature (20)..(20): Phosphorothioate or Phosphorodithioate 3'-Internucleotide Linkage (optionally present)
  misc_feature (1). .(19): ribonucleotide unmodified or modified as described for this sequence
gggagcugguaucggggcutt

SEQ ID NO: 404 - RNA, 21 nt, Artificial Sequence
  Description of Artificial Sequence: Target Sequence/siNA antisense region (stab35)
  misc_feature (4)..(5): 2'-O-methyl
  misc_feature (6)..(7): 2'-deoxy-2'Fluoro
  misc_feature (8)..(9): 2'-O-methyl
  misc_feature (10)..(10): 2'-deoxy-2'Fluoro
  misc_feature (11)..(11): 2'-O-methyl
  misc_feature (12)..(13): 2'-deoxy-2'Fluoro
  misc_feature (14)..(17): 2'-O-methyl
  misc_feature (18)..(19): 2'-deoxy-2'Fluoro
  misc_feature (20)..(21): 2'-O-methyl
gggagcugguaucggggcuuu

SEQ ID NO: 405 - RNA, 21 nt, Artificial Sequence
  Description of Artificial Sequence: Target Sequence/siNA antisense region (stab36)
  misc_feature (4)..(5): 2'-O-methyl
  misc_feature (6)..(7): 2'-deoxy-2'Fluoro
  misc_feature (8)..(9): 2'-O-methyl
  misc_feature (10)..(10): 2'-deoxy-2'Fluoro
  misc_feature (11)..(11): 2'-O-methyl
  misc_feature (12)..(13): 2'-deoxy-2'Fluoro
  misc_feature (14)..(17): 2'-O-methyl
  misc_feature (18)..(19): 2'-deoxy-2'Fluoro
  misc_feature (20)..(21): 2'-O-methyl
gggagcugguaucggggcugg

SEQ ID NO: 406 - RNA, 19 nt, Artificial Sequence
  Description of Artificial Sequence: Target Sequence/siNA sense region
ccaggcagcuugucuccac

SEQ ID NO: 407 - RNA, 19 nt, Artificial Sequence
  Description of Artificial Sequence: Target Sequence/siNA antisense region
guggagacaagcugccugg

SEQ ID NO: 408 - DNA, 21 bp, Artificial Sequence
  Description of Artificial Sequence: Target Sequence/siNA sense region (stab00)
  misc_feature (1)..(19): ribonucleotide unmodified or modified as described for this sequence
ccaggcagcuugucuccactt

SEQ ID NO: 409 - DNA, 21 bp, Artificial Sequence
  Description of Artificial Sequence: Target Sequence/siNA antisense region (stab00as)
  misc_feature (1)..(19): ribonucleotide unmodified or modified as described for this sequence
guggagacaagcugccuggtt

SEQ ID NO: 410 - DNA, 21 bp, Artificial Sequence
  Description of Artificial Sequence: Target Sequence/siNA sense region (stab04)
  misc_feature (1)..(1): 5'-3 attached terminal deoxyabasic moiety, inverted abasic, inverted nucleotide or other terminal cap that is optionally present
  misc_feature (21)..(21): 3'-3 attached terminal deoxyabasic moiety, inverted abasic, inverted nucleotide or other terminal cap that is optionally present
  misc_feature (1)..(2): 2'-deoxy-2'Fluoro
  misc_feature (6)..(6): 2'-deoxy-2'Fluoro
  misc_feature (9)..(11): 2'-deoxy-2'Fluoro
  misc_feature (13)..(17): 2'-deoxy-2'Fluoro
  misc_feature (19)..(19): 2'-deoxy-2'Fluoro
  misc_feature (1). .(19): ribonucleotide unmodified or modified as described for this sequence
ccaggcagcuugucuccactt

SEQ ID NO: 411 - DNA, 21 bp, Artificial Sequence
  Description of Artificial Sequence: Target Sequence/siNA antisense region (stab05)
  misc_feature (2)..(2): 2'-deoxy-2'Fluoro
  misc_feature (8)..(8): 2'-deoxy-2'Fluoro
  misc_feature (12)..(13): 2'-deoxy-2'Fluoro
  misc_feature (15)..(17): 2'-deoxy-2'Fluoro
  misc_feature (20)..(20): Phosphorothioate or Phosphorodithioate 3'-Internucleotide Linkage (optionally present)
  misc_feature (1). .(19): ribonucleotide unmodified or modified as described for this sequence
guggagacaagcugccuggtt

SEQ ID NO: 412 - DNA, 21 bp, Artificial Sequence
  Description of Artificial Sequence: Target Sequence/siNA sense region (stab07)
  misc_feature (1)..(1): 5'-3 attached terminal deoxyabasic moiety, inverted abasic, inverted nucleotide or other terminal cap that is optionally present
  misc_feature (21)..(21): 3'-3 attached terminal deoxyabasic moiety, inverted abasic, inverted nucleotide or other terminal cap that is optionally present
  misc_feature (1)..(2): 2'-deoxy-2'Fluoro
  misc_feature (6)..(6): 2'-deoxy-2'Fluoro
  misc_feature (9)..(11): 2'-deoxy-2'Fluoro
  misc_feature (13)..(17): 2'-deoxy-2'Fluoro
  misc_feature (19)..(19): 2'-deoxy-2'Fluoro
  misc_feature (1)..(19): ribonucleotide unmodified or modified as described for this sequence
ccaggcagcuugucuccactt

SEQ ID NO: 413 - DNA, 21 bp, Artificial Sequence
  Description of Artificial Sequence: Target Sequence/siNA antisense region (stab08)
  misc_feature (1)..(1): 2'-O-methyl
  misc_feature (2)..(2): 2'-deoxy-2'Fluoro
  misc_feature (3)..(7): 2'-O-methyl
  misc_feature (8)..(8): 2'-deoxy-2'Fluoro
  misc_feature (9)..(11): 2'-O-methyl
  misc_feature (12)..(13): 2'-deoxy-2'Fluoro
  misc_feature (14)..(14): 2'-O-methyl
  misc_feature (15)..(17): 2'-deoxy-2'Fluoro
  misc_feature (18)..(19): 2'-O-methyl
  misc_feature (20)..(20): Phosphorothioate or Phosphorodithioate 3'-Internucleotide Linkage (optionally present)
  misc_feature (1)..(19): ribonucleotide unmodified or modified as described for this sequence
guggagacaagcugccuggtt

SEQ ID NO: 414 - DNA, 21 bp, Artificial Sequence
  Description of Artificial Sequence: Target Sequence/siNA sense region (stab09)
  misc_feature (1)..(1): 5'-3 attached terminal deoxyabasic moiety, inverted abasic, inverted nucleotide or other terminal cap that is optionally present
  misc_feature (21)..(21): 3'-3 attached terminal deoxyabasic moiety, inverted abasic, inverted nucleotide or other terminal cap that is optionally present
  misc_feature (1)..(19): ribonucleotide unmodified or modified as described for this sequence
ccaggcagcuugucuccactt

SEQ ID NO: 415 - DNA, 21 bp, Artificial Sequence
  Description of Artificial Sequence: Target Sequence/siNA antisense region (stab10)
  misc_feature (20)..(20): Phosphorothioate or Phosphorodithioate 3'-Internucleotide Linkage (optionally present)
  misc_feature (1)..(19): ribonucleotide unmodified or modified as described for this sequence
guggagacaagcugccuggtt

SEQ ID NO: 416 - DNA, 21 bp, Artificial Sequence
  Description of Artificial Sequence: Target Sequence/siNA antisense region (stab19)
  misc_feature (21)..(21): 3'-3 attached terminal deoxyabasic moiety, inverted abasic, inverted nucleotide or other terminal cap that is optionally present
  misc_feature (1)..(1): 2'-O-methyl
  misc_feature (2)..(2): 2'-deoxy-2'Fluoro
  misc_feature (3)..(7): 2'-O-methyl
  misc_feature (8)..(8): 2'-deoxy-2'Fluoro
  misc_feature (9)..(11): 2'-O-methyl
  misc_feature (12)..(13): 2'-deoxy-2'Fluoro
  misc_feature (14)..(14): 2'-O-methyl
  misc_feature (15)..(17): 2'-deoxy-2'Fluoro
  misc_feature (18)..(19): 2'-O-methyl
  misc_feature (1)..(19): ribonucleotide unmodified or modified as described for this sequence
guggagacaagcugccuggtt

SEQ ID NO: 417 - DNA, 21 bp, Artificial Sequence
  Description of Artificial Sequence: Target Sequence/siNA antisense region (stab22)
  misc_feature (21)..(21): 3'-3 attached terminal deoxyabasic moiety, inverted abasic, inverted nucleotide or other terminal cap that is optionally present
  misc_feature (20)..(20): Phosphorothioate or Phosphorodithioate 3'-Internucleotide Linkage (optionally present)
  misc_feature (1)..(19): ribonucleotide unmodified or modified as described for this sequence
guggagacaagcugccuggtt

SEQ ID NO: 418 - DNA, 21 bp, Artificial Sequence
  Description of Artificial Sequence: Target Sequence/siNA antisense region (stab25)
  misc_feature (4)..(7): 2'-O-methyl
  misc_feature (8)..(8): 2'-deoxy-2'Fluoro
  misc_feature (9)..(11): 2'-O-methyl
  misc_feature (12)..(13): 2'-deoxy-2'Fluoro
  misc_feature (14)..(14): 2'-O-methyl
  misc_feature (15)..(17): 2'-deoxy-2'Fluoro
  misc_feature (18)..(19): 2'-O-methyl
  misc_feature (20)..(20): Phosphorothioate or Phosphorodithioate 3'-Internucleotide Linkage (optionally present)
  misc_feature (1)..(19): ribonucleotide unmodified or modified as described for this sequence
guggagacaagcugccuggtt

SEQ ID NO: 419 - RNA, 21 nt, Artificial Sequence
  Description of Artificial Sequence: Target Sequence/siNA antisense region (stab35)
  misc_feature (4)..(7): 2'-O-methyl
  misc_feature (8)..(8): 2'-deoxy-2'Fluoro
  misc_feature (9)..(11): 2'-O-methyl
  misc_feature (12)..(13): 2'-deoxy-2'Fluoro
  misc_feature (14)..(14): 2'-O-methyl
  misc_feature (15)..(17): 2'-deoxy-2'Fluoro
  misc_feature (18)..(21): 2'-O-methyl
guggagacaagcugccugguu

SEQ ID NO: 420 - RNA, 21 nt, Artificial Sequence
  Description of Artificial Sequence: Target Sequence/siNA antisense region (stab36)
  misc_feature (4)..(7): 2'-O-methyl
  misc_feature (8)..(8): 2'-deoxy-2'Fluoro
  misc_feature (9)..(11): 2'-O-methyl
  misc_feature (12)..(13): 2'-deoxy-2'Fluoro
  misc_feature (14)..(14): 2'-O-methyl
  misc_feature (15)..(17): 2'-deoxy-2'Fluoro
  misc_feature (18)..(21): 2'-O-methyl
guggagacaagcugccugggg

SEQ ID NO: 421 - RNA, 19 nt, Artificial Sequence
  Description of Artificial Sequence: Target Sequence/siNA sense region
ccuccugccacauugagcu

SEQ ID NO: 422 - RNA, 19 nt, Artificial Sequence
  Description of Artificial Sequence: Target Sequence/siNA antisense region
agcucaauguggcaggagg

SEQ ID NO: 423 - DNA, 21 bp, Artificial Sequence
  Description of Artificial Sequence: Target Sequence/siNA sense region (stab00)
  misc_feature (1)..(19): ribonucleotide unmodified or modified as described for this sequence
ccuccugccacauugagcutt

SEQ ID NO: 424 - DNA, 21 bp, Artificial Sequence
  Description of Artificial Sequence: Target Sequence/siNA antisense region (stab00as)
  misc_feature (1)..(19): ribonucleotide unmodified or modified as described for this sequence
agcucaauguggcaggaggtt

SEQ ID NO: 425 - DNA, 21 bp, Artificial Sequence
  Description of Artificial Sequence: Target Sequence/siNA sense region (stab04)
  misc_feature (1)..(1): 5'-3 attached terminal deoxyabasic moiety, inverted abasic, inverted nucleotide or other terminal cap that is optionally present
  misc_feature (21)..(21): 3'-3 attached terminal deoxyabasic moiety, inverted abasic, inverted nucleotide or other terminal cap that is optionally present
  misc_feature (1)..(6): 2'-deoxy-2'Fluoro
  misc_feature (8)..(9): 2'-deoxy-2'Fluoro
  misc_feature (11)..(11): 2'-deoxy-2'Fluoro
  misc_feature (13)..(14): 2'-deoxy-2'Fluoro
  misc_feature (18)..(19): 2'-deoxy-2'Fluoro
  misc_feature (1). .(19): ribonucleotide unmodified or modified as described for this sequence
ccuccugccacauugagcutt

SEQ ID NO: 426 - DNA, 21 bp, Artificial Sequence
  Description of Artificial Sequence: Target Sequence/siNA antisense region (stab05)
  misc_feature (3)..(5): 2'-deoxy-2'Fluoro
  misc_feature (8)..(8): 2'-deoxy-2'Fluoro
  misc_feature (10)..(10): 2'-deoxy-2'Fluoro
  misc_feature (13)..(13): 2'-deoxy-2'Fluoro
  misc_feature (20)..(20): Phosphorothioate or Phosphorodithioate 3'-Internucleotide Linkage (optionally present)
  misc_feature (1). .(19): ribonucleotide unmodified or modified as described for this sequence
agcucaauguggcaggaggtt

SEQ ID NO: 427 - DNA, 21 bp, Artificial Sequence
  Description of Artificial Sequence: Target Sequence/siNA sense region (stab07)
  misc_feature (1)..(1): 5'-3 attached terminal deoxyabasic moiety, inverted abasic, inverted nucleotide or other terminal cap that is optionally present
  misc_feature (21)..(21): 3'-3 attached terminal deoxyabasic moiety, inverted abasic, inverted nucleotide or other terminal cap that is optionally present
  misc_feature (1)..(6): 2'-deoxy-2'Fluoro
  misc_feature (8)..(9): 2'-deoxy-2'Fluoro
  misc_feature (11)..(11): 2'-deoxy-2'Fluoro
  misc_feature (13)..(14): 2'-deoxy-2'Fluoro
  misc_feature (18)..(19): 2'-deoxy-2'Fluoro
  misc_feature (1)..(19): ribonucleotide unmodified or modified as described for this sequence
ccuccugccacauugagcutt

SEQ ID NO: 428 - DNA, 21 bp, Artificial Sequence
  Description of Artificial Sequence: Target Sequence/siNA antisense region (stab08)
  misc_feature (1)..(2): 2'-O-methyl
  misc_feature (3)..(5): 2'-deoxy-2'Fluoro
  misc_feature (6)..(7): 2'-O-methyl
  misc_feature (8)..(8): 2'-deoxy-2'Fluoro
  misc_feature (9)..(9): 2'-O-methyl
  misc_feature (10)..(10): 2'-deoxy-2'Fluoro
  misc_feature (11)..(12): 2'-O-methyl
  misc_feature (13)..(13): 2'-deoxy-2'Fluoro
  misc_feature (14)..(19): 2'-O-methyl
  misc_feature (20)..(20): Phosphorothioate or Phosphorodithioate 3'-Internucleotide Linkage (optionally present)
  misc_feature (1)..(19): ribonucleotide unmodified or modified as described for this sequence
agcucaauguggcaggaggtt

SEQ ID NO: 429 - DNA, 21 bp, Artificial Sequence
  Description of Artificial Sequence: Target Sequence/siNA sense region (stab09)
  misc_feature (1)..(1): 5'-3 attached terminal deoxyabasic moiety, inverted abasic, inverted nucleotide or other terminal cap that is optionally present
  misc_feature (21)..(21): 3'-3 attached terminal deoxyabasic moiety, inverted abasic, inverted nucleotide or other terminal cap that is optionally present
  misc_feature (1)..(19): ribonucleotide unmodified or modified as described for this sequence
ccuccugccacauugagcutt

SEQ ID NO: 430 - DNA, 21 bp, Artificial Sequence
  Description of Artificial Sequence: Target Sequence/siNA antisense region (stab10)
  misc_feature (20)..(20): Phosphorothioate or Phosphorodithioate 3'-Internucleotide Linkage (optionally present)
  misc_feature (1)..(19): ribonucleotide unmodified or modified as described for this sequence
agcucaauguggcaggaggtt

SEQ ID NO: 431 - DNA, 21 bp, Artificial Sequence
  Description of Artificial Sequence: Target Sequence/siNA antisense region (stab19)
  misc_feature (21)..(21): 3'-3 attached terminal deoxyabasic moiety, inverted abasic, inverted nucleotide or other terminal cap that is optionally present
  misc_feature (1)..(2): 2'-O-methyl
  misc_feature (3)..(5): 2'-deoxy-2'Fluoro
  misc_feature (6)..(7): 2'-O-methyl
  misc_feature (8)..(8): 2'-deoxy-2'Fluoro
  misc_feature (9)..(9): 2'-O-methyl
  misc_feature (10)..(10): 2'-deoxy-2'Fluoro
  misc_feature (11)..(12): 2'-O-methyl
  misc_feature (13)..(13): 2'-deoxy-2'Fluoro
  misc_feature (14)..(19): 2'-O-methyl
  misc_feature (1)..(19): ribonucleotide unmodified or modified as described for this sequence
agcucaauguggcaggaggtt

SEQ ID NO: 432 - DNA, 21 bp, Artificial Sequence
  Description of Artificial Sequence: Target Sequence/siNA antisense region (stab22)
  misc_feature (21)..(21): 3'-3 attached terminal deoxyabasic moiety, inverted abasic, inverted nucleotide or other terminal cap that is optionally present
  misc_feature (20)..(20): Phosphorothioate or Phosphorodithioate 3'-Internucleotide Linkage (optionally present)
  misc_feature (1)..(19): ribonucleotide unmodified or modified as described for this sequence
agcucaauguggcaggaggtt

SEQ ID NO: 433 - DNA, 21 bp, Artificial Sequence
  Description of Artificial Sequence: Target Sequence/siNA antisense region (stab25)
  misc_feature (4)..(5): 2'-deoxy-2'Fluoro
  misc_feature (6)..(7): 2'-O-methyl
  misc_feature (8)..(8): 2'-deoxy-2'Fluoro
  misc_feature (9)..(9): 2'-O-methyl
  misc_feature (10)..(10): 2'-deoxy-2'Fluoro
  misc_feature (11)..(12): 2'-O-methyl
  misc_feature (13)..(13): 2'-deoxy-2'Fluoro
  misc_feature (14)..(19): 2'-O-methyl
  misc_feature (20)..(20): Phosphorothioate or Phosphorodithioate 3'-Internucleotide Linkage (optionally present)
  misc_feature (1). .(19): ribonucleotide unmodified or modified as described for this sequence
agcucaauguggcaggaggtt

SEQ ID NO: 434 - RNA, 21 nt, Artificial Sequence
  Description of Artificial Sequence: Target Sequence/siNA antisense region (stab35)
  misc_feature (4)..(5): 2'-deoxy-2'Fluoro
  misc_feature (6)..(7): 2'-O-methyl
  misc_feature (8)..(8): 2'-deoxy-2'Fluoro
  misc_feature (9)..(9): 2'-O-methyl
  misc_feature (10)..(10): 2'-deoxy-2'Fluoro
  misc_feature (11)..(12): 2'-O-methyl
  misc_feature (13)..(13): 2'-deoxy-2'Fluoro
  misc_feature (14)..(21): 2'-O-methyl
agcucaauguggcaggagguu

SEQ ID NO: 435 - RNA, 21 nt, Artificial Sequence
  Description of Artificial Sequence: Target Sequence/siNA antisense region (stab36)
  misc_feature (4)..(5): 2'-deoxy-2'Fluoro
  misc_feature (6)..(7): 2'-O-methyl
  misc_feature (8)..(8): 2'-deoxy-2'Fluoro
  misc_feature (9)..(9): 2'-O-methyl
  misc_feature (10)..(10): 2'-deoxy-2'Fluoro
  misc_feature (11)..(12): 2'-O-methyl
  misc_feature (13)..(13): 2'-deoxy-2'Fluoro
  misc_feature (14)..(21): 2'-O-methyl
agcucaauguggcaggaggug

SEQ ID NO: 436 - RNA, 19 nt, Artificial Sequence
  Description of Artificial Sequence: Target Sequence/siNA sense region
uccucucuugaagccuucc

SEQ ID NO: 437 - RNA, 19 nt, Artificial Sequence
  Description of Artificial Sequence: Target Sequence/siNA antisense region
ggaaggcuucaagagagga

SEQ ID NO: 438 - DNA, 21 bp, Artificial Sequence
  Description of Artificial Sequence: Target Sequence/siNA sense region (stab00)
  misc_feature (1)..(19): ribonucleotide unmodified or modified as described for this sequence
uccucucuugaagccuucctt

SEQ ID NO: 439 - DNA, 21 bp, Artificial Sequence
  Description of Artificial Sequence: Target Sequence/siNA antisense region (stab00as)
  misc_feature (1)..(19): ribonucleotide unmodified or modified as described for this sequence
ggaaggcuucaagagaggatt

SEQ ID NO: 440 - DNA, 21 bp, Artificial Sequence
  Description of Artificial Sequence: Target Sequence/siNA sense region (stab04)
  misc_feature (1)..(1): 5'-3 attached terminal deoxyabasic moiety, inverted abasic, inverted nucleotide or other terminal cap that is optionally present
  misc_feature (21)..(21): 3'-3 attached terminal deoxyabasic moiety, inverted abasic, inverted nucleotide or other terminal cap that is optionally present
  misc_feature (1)..(9): 2'-deoxy-2'Fluoro
  misc_feature (14)..(19): 2'-deoxy-2'Fluoro
  misc_feature (1). .(19): ribonucleotide unmodified or modified as described for this sequence
uccucucuugaagccuucctt

SEQ ID NO: 441 - DNA, 21 bp, Artificial Sequence
  Description of Artificial Sequence: Target Sequence/siNA antisense region (stab05)
  misc_feature (7)..(10): 2'-deoxy-2'Fluoro
  misc_feature (20)..(20): Phosphorothioate or Phosphorodithioate 3'-Internucleotide Linkage (optionally present)
  misc_feature (1). .(19): ribonucleotide unmodified or modified as described for this sequence
ggaaggcuucaagagaggatt

SEQ ID NO: 442 - DNA, 21 bp, Artificial Sequence
  Description of Artificial Sequence: Target Sequence/siNA sense region (stab07)
  misc_feature (1)..(1): 5'-3 attached terminal deoxyabasic moiety, inverted abasic, inverted nucleotide or other terminal cap that is optionally present
  misc_feature (21)..(21): 3'-3 attached terminal deoxyabasic moiety, inverted abasic, inverted nucleotide or other terminal cap that is optionally present
  misc_feature (1)..(9): 2'-deoxy-2'Fluoro
  misc_feature (14)..(19): 2'-deoxy-2'Fluoro
  misc_feature (1)..(19): ribonucleotide unmodified or modified as described for this sequence
uccucucuugaagccuucctt

SEQ ID NO: 443 - DNA, 21 bp, Artificial Sequence
  Description of Artificial Sequence: Target Sequence/siNA antisense region (stab08)
  misc_feature (1)..(6): 2'-O-methyl
  misc_feature (7)..(10): 2'-deoxy-2'Fluoro
  misc_feature (11)..(19): 2'-O-methyl
  misc_feature (20)..(20): Phosphorothioate or Phosphorodithioate 3'-Internucleotide Linkage (optionally present)
  misc_feature (1)..(19): ribonucleotide unmodified or modified as described for this sequence
ggaaggcuucaagagaggatt

SEQ ID NO: 444 - DNA, 21 bp, Artificial Sequence
  Description of Artificial Sequence: Target Sequence/siNA sense region (stab09)
  misc_feature (1)..(1): 5'-3 attached terminal deoxyabasic moiety, inverted abasic, inverted nucleotide or other terminal cap that is optionally present
  misc_feature (21)..(21): 3'-3 attached terminal deoxyabasic moiety, inverted abasic, inverted nucleotide or other terminal cap that is optionally present
  misc_feature (1)..(19): ribonucleotide unmodified or modified as described for this sequence
uccucucuugaagccuucctt

SEQ ID NO: 445 - DNA, 21 bp, Artificial Sequence
  Description of Artificial Sequence: Target Sequence/siNA antisense region (stab10)
  misc_feature (20)..(20): Phosphorothioate or Phosphorodithioate 3'-Internucleotide Linkage (optionally present)
  misc_feature (1)..(19): ribonucleotide unmodified or modified as described for this sequence
ggaaggcuucaagagaggatt

SEQ ID NO: 446 - DNA, 21 bp, Artificial Sequence
  Description of Artificial Sequence: Target Sequence/siNA antisense region (stab19)
  misc_feature (21)..(21): 3'-3 attached terminal deoxyabasic moiety, inverted abasic, inverted nucleotide or other terminal cap that is optionally present
  misc_feature (1)..(6): 2'-O-methyl
  misc_feature (7)..(10): 2'-deoxy-2'Fluoro
  misc_feature (11)..(19): 2'-O-methyl
  misc_feature (1)..(19): ribonucleotide unmodified or modified as described for this sequence
ggaaggcuucaagagaggatt

SEQ ID NO: 447 - DNA, 21 bp, Artificial Sequence
  Description of Artificial Sequence: Target Sequence/siNA antisense region (stab22)
  misc_feature (21)..(21): 3'-3 attached terminal deoxyabasic moiety, inverted abasic, inverted nucleotide or other terminal cap that is optionally present
  misc_feature (20)..(20): Phosphorothioate or Phosphorodithioate 3'-Internucleotide Linkage (optionally present)
  misc_feature (1)..(19): ribonucleotide unmodified or modified as described for this sequence
ggaaggcuucaagagaggatt

SEQ ID NO: 448 - DNA, 21 bp, Artificial Sequence
  Description of Artificial Sequence: Target Sequence/siNA antisense region (stab25)
  misc_feature (4)..(6): 2'-O-methyl
  misc_feature (7)..(10): 2'-deoxy-2'Fluoro
  misc_feature (11)..(19): 2'-O-methyl
  misc_feature (20)..(20): Phosphorothioate or Phosphorodithioate 3'-Internucleotide Linkage (optionally present)
  misc_feature (1). .(19): ribonucleotide unmodified or modified as described for this sequence
ggaaggcuucaagagaggatt

SEQ ID NO: 449 - RNA, 21 nt, Artificial Sequence
  Description of Artificial Sequence: Target Sequence/siNA antisense region (stab35)
  misc_feature (4)..(6): 2'-O-methyl
  misc_feature (7)..(10): 2'-deoxy-2'Fluoro
  misc_feature (11)..(21): 2'-O-methyl
ggaaggcuucaagagaggauu

SEQ ID NO: 450 - RNA, 21 nt, Artificial Sequence
  Description of Artificial Sequence: Target Sequence/siNA antisense region (stab36)
  misc_feature (4)..(6): 2'-O-methyl
  misc_feature (7)..(10): 2'-deoxy-2'Fluoro
  misc_feature (11)..(21): 2'-O-methyl
ggaaggcuucaagagaggagc

SEQ ID NO: 451 - RNA, 19 nt, Artificial Sequence
  Description of Artificial Sequence: Target Sequence/siNA sense region
cugagcgggccgcaggcag

SEQ ID NO: 452 - RNA, 19 nt, Artificial Sequence
  Description of Artificial Sequence: Target Sequence/siNA antisense region
cugccugcggcccgcucag

SEQ ID NO: 453 - DNA, 21 bp, Artificial Sequence
  Description of Artificial Sequence: Target Sequence/siNA sense region (stab00)
  misc_feature (1)..(19): ribonucleotide unmodified or modified as described for this sequence
cugagcgggccgcaggcagtt

SEQ ID NO: 454 - DNA, 21 bp, Artificial Sequence
  Description of Artificial Sequence: Target Sequence/siNA antisense region (stab00as)
  misc_feature (1)..(19): ribonucleotide unmodified or modified as described for this sequence
cugccugcggcccgcucagtt

SEQ ID NO: 455 - DNA, 21 bp, Artificial Sequence
  Description of Artificial Sequence: Target Sequence/siNA sense region (stab04)
  misc_feature (1)..(1): 5'-3 attached terminal deoxyabasic moiety, inverted abasic, inverted nucleotide or other terminal cap that is optionally present
  misc_feature (21)..(21): 3'-3 attached terminal deoxyabasic moiety, inverted abasic, inverted nucleotide or other terminal cap that is optionally present
  misc_feature (1)..(2): 2'-deoxy-2'Fluoro
  misc_feature (6)..(6): 2'-deoxy-2'Fluoro
  misc_feature (10)..(11): 2'-deoxy-2'Fluoro
  misc_feature (13)..(13): 2'-deoxy-2'Fluoro
  misc_feature (17)..(17): 2'-deoxy-2'Fluoro
  misc_feature (1). .(19): ribonucleotide unmodified or modified as described for this sequence
cugagcgggccgcaggcagtt

SEQ ID NO: 456 - DNA, 21 bp, Artificial Sequence
  Description of Artificial Sequence: Target Sequence/siNA antisense region (stab05)
  misc_feature (1)..(2): 2'-deoxy-2'Fluoro
  misc_feature (4)..(6): 2'-deoxy-2'Fluoro
  misc_feature (8)..(8): 2'-deoxy-2'Fluoro
  misc_feature (11)..(13): 2'-deoxy-2'Fluoro
  misc_feature (15)..(17): 2'-deoxy-2'Fluoro
  misc_feature (20)..(20): Phosphorothioate or Phosphorodithioate 3'-Internucleotide Linkage (optionally present)
  misc_feature (1). .(19): ribonucleotide unmodified or modified as described for this sequence
cugccugcggcccgcucagtt

SEQ ID NO: 457 - DNA, 21 bp, Artificial Sequence
  Description of Artificial Sequence: Target Sequence/siNA sense region (stab07)
  misc_feature (1)..(1): 5'-3 attached terminal deoxyabasic moiety, inverted abasic, inverted nucleotide or other terminal cap that is optionally present
  misc_feature (21)..(21): 3'-3 attached terminal deoxyabasic moiety, inverted abasic, inverted nucleotide or other terminal cap that is optionally present
  misc_feature (1)..(2): 2'-deoxy-2'Fluoro
  misc_feature (6)..(6): 2'-deoxy-2'Fluoro
  misc_feature (10)..(11): 2'-deoxy-2'Fluoro
  misc_feature (13)..(13): 2'-deoxy-2'Fluoro
  misc_feature (17)..(17): 2'-deoxy-2'Fluoro
  misc_feature (1)..(19): ribonucleotide unmodified or modified as described for this sequence
cugagcgggccgcaggcagtt

SEQ ID NO: 458 - DNA, 21 bp, Artificial Sequence
  Description of Artificial Sequence: Target Sequence/siNA antisense region (stab08)
  misc_feature (1)..(2): 2'-deoxy-2'Fluoro
  misc_feature (3)..(3): 2'-O-methyl
  misc_feature (4)..(6): 2'-deoxy-2'Fluoro
  misc_feature (7)..(7): 2'-O-methyl
  misc_feature (8)..(8): 2'-deoxy-2'Fluoro
  misc_feature (9)..(10): 2'-O-methyl
  misc_feature (11)..(13): 2'-deoxy-2'Fluoro
  misc_feature (14)..(14): 2'-O-methyl
  misc_feature (15)..(17): 2'-deoxy-2'Fluoro
  misc_feature (18)..(19): 2'-O-methyl
  misc_feature (20)..(20): Phosphorothioate or Phosphorodithioate 3'-Internucleotide Linkage (optionally present)
  misc_feature (1)..(19): ribonucleotide unmodified or modified as described for this sequence
cugccugcggcccgcucagtt

SEQ ID NO: 459 - DNA, 21 bp, Artificial Sequence
  Description of Artificial Sequence: Target Sequence/siNA sense region (stab09)
  misc_feature (1)..(1): 5'-3 attached terminal deoxyabasic moiety, inverted abasic, inverted nucleotide or other terminal cap that is optionally present
  misc_feature (21)..(21): 3'-3 attached terminal deoxyabasic moiety, inverted abasic, inverted nucleotide or other terminal cap that is optionally present
  misc_feature (1)..(19): ribonucleotide unmodified or modified as described for this sequence
cugagcgggccgcaggcagtt

SEQ ID NO: 460 - DNA, 21 bp, Artificial Sequence
  Description of Artificial Sequence: Target Sequence/siNA antisense region (stab10)
  misc_feature (20)..(20): Phosphorothioate or Phosphorodithioate 3'-Internucleotide Linkage (optionally present)
  misc_feature (1)..(19): ribonucleotide unmodified or modified as described for this sequence
cugccugcggcccgcucagtt

SEQ ID NO: 461 - DNA, 21 bp, Artificial Sequence
  Description of Artificial Sequence: Target Sequence/siNA antisense region (stab19)
  misc_feature (21)..(21): 3'-3 attached terminal deoxyabasic moiety, inverted abasic, inverted nucleotide or other terminal cap that is optionally present
  misc_feature (1)..(2): 2'-deoxy-2'Fluoro
  misc_feature (3)..(3): 2'-O-methyl
  misc_feature (4)..(6): 2'-deoxy-2'Fluoro
  misc_feature (7)..(7): 2'-O-methyl
  misc_feature (8)..(8): 2'-deoxy-2'Fluoro
  misc_feature (9)..(10): 2'-O-methyl
  misc_feature (11)..(13): 2'-deoxy-2'Fluoro
  misc_feature (14)..(14): 2'-O-methyl
  misc_feature (15)..(17): 2'-deoxy-2'Fluoro
  misc_feature (18)..(19): 2'-O-methyl
  misc_feature (1)..(19): ribonucleotide unmodified or modified as described for this sequence
cugccugcggcccgcucagtt

SEQ ID NO: 462 - DNA, 21 bp, Artificial Sequence
  Description of Artificial Sequence: Target Sequence/siNA antisense region (stab22)
  misc_feature (21)..(21): 3'-3 attached terminal deoxyabasic moiety, inverted abasic, inverted nucleotide or other terminal cap that is optionally present
  misc_feature (20)..(20): Phosphorothioate or Phosphorodithioate 3'-Internucleotide Linkage (optionally present)
  misc_feature (1)..(19): ribonucleotide unmodified or modified as described for this sequence
cugccugcggcccgcucagtt

SEQ ID NO: 463 - DNA, 21 bp, Artificial Sequence
  Description of Artificial Sequence: Target Sequence/siNA antisense region (stab25)
  misc_feature (4)..(6): 2'-deoxy-2'Fluoro
  misc_feature (7)..(7): 2'-O-methyl
  misc_feature (8)..(8): 2'-deoxy-2'Fluoro
  misc_feature (9)..(10): 2'-O-methyl
  misc_feature (11)..(13): 2'-deoxy-2'Fluoro
  misc_feature (14)..(14): 2'-O-methyl
  misc_feature (15)..(17): 2'-deoxy-2'Fluoro
  misc_feature (18)..(19): 2'-O-methyl
  misc_feature (20)..(20): Phosphorothioate or Phosphorodithioate 3'-Internucleotide Linkage (optionally present)
  misc_feature (1)..(3): ribonucleotide
cugccugcggcccgcucagtt

SEQ ID NO: 464 - RNA, 21 nt, Artificial Sequence
  Description of Artificial Sequence: Target Sequence/siNA antisense region (stab35)
  misc_feature (4)..(6): 2'-deoxy-2'Fluoro
  misc_feature (7)..(7): 2'-O-methyl
  misc_feature (8)..(8): 2'-deoxy-2'Fluoro
  misc_feature (9)..(10): 2'-O-methyl
  misc_feature (11)..(13): 2'-deoxy-2'Fluoro
  misc_feature (14)..(14): 2'-O-methyl
  misc_feature (15)..(17): 2'-deoxy-2'Fluoro
  misc_feature (18)..(21): 2'-O-methyl
cugccugcggcccgcucaguu

SEQ ID NO: 465 - RNA, 21 nt, Artificial Sequence
  Description of Artificial Sequence: Target Sequence/siNA antisense region (stab36)
  misc_feature (4)..(6): 2'-deoxy-2'Fluoro
  misc_feature (7)..(7): 2'-O-methyl
  misc_feature (8)..(8): 2'-deoxy-2'Fluoro
  misc_feature (9)..(10): 2'-O-methyl
  misc_feature (11)..(13): 2'-deoxy-2'Fluoro
  misc_feature (14)..(14): 2'-O-methyl
  misc_feature (15)..(17): 2'-deoxy-2'Fluoro
  misc_feature (18)..(21): 2'-O-methyl
cugccugcggcccgcucagga

SEQ ID NO: 466 - RNA, 19 nt, Artificial Sequence
  Description of Artificial Sequence: Target Sequence/siNA sense region
gcgcccucaccccuguccc

SEQ ID NO: 467 - RNA, 19 nt, Artificial Sequence
  Description of Artificial Sequence: Target Sequence/siNA antisense region
gggacaggggugagggcgc

SEQ ID NO: 468 - DNA, 21 bp, Artificial Sequence
  Description of Artificial Sequence: Target Sequence/siNA sense region (stab00)
  misc_feature (1)..(19): ribonucleotide unmodified or modified as described for this sequence
gcgcccucaccccuguccctt

SEQ ID NO: 469 - DNA, 21 bp, Artificial Sequence
  Description of Artificial Sequence: Target Sequence/siNA antisense region (stab00as)
  misc_feature (1)..(19): ribonucleotide unmodified or modified as described for this sequence
gggacaggggugagggcgctt

SEQ ID NO: 470 - DNA, 21 bp, Artificial Sequence
  Description of Artificial Sequence: Target Sequence/siNA sense region (stab04)
  misc_feature (1)..(1): 5'-3 attached terminal deoxyabasic moiety, inverted abasic, inverted nucleotide or other terminal cap that is optionally present
  misc_feature (21)..(21): 3'-3 attached terminal deoxyabasic moiety, inverted abasic, inverted nucleotide or other terminal cap that is optionally present
  misc_feature (2)..(2): 2'-deoxy-2'Fluoro
  misc_feature (4)..(8): 2'-deoxy-2'Fluoro
  misc_feature (10)..(14): 2'-deoxy-2'Fluoro
  misc_feature (16)..(19): 2'-deoxy-2'Fluoro
  misc_feature (1). .(19): ribonucleotide unmodified or modified as described for this sequence
gcgcccucaccccuguccctt

SEQ ID NO: 471 - DNA, 21 bp, Artificial Sequence
  Description of Artificial Sequence: Target Sequence/siNA antisense region (stab05)
  misc_feature (5)..(5): 2'-deoxy-2'Fluoro
  misc_feature (11)..(11): 2'-deoxy-2'Fluoro
  misc_feature (17)..(17): 2'-deoxy-2'Fluoro
  misc_feature (19)..(19): 2'-deoxy-2'Fluoro
  misc_feature (20)..(20): Phosphorothioate or Phosphorodithioate 3'-Internucleotide Linkage (optionally present)
  misc_feature (1). .(19): ribonucleotide unmodified or modified as described for this sequence
gggacaggggugagggcgctt

SEQ ID NO: 472 - DNA, 21 bp, Artificial Sequence
  Description of Artificial Sequence: Target Sequence/siNA sense region (stab07)
  misc_feature (1)..(1): 5'-3 attached terminal deoxyabasic moiety, inverted abasic, inverted nucleotide or other terminal cap that is optionally present
  misc_feature (21)..(21): 3'-3 attached terminal deoxyabasic moiety, inverted abasic, inverted nucleotide or other terminal cap that is optionally present
  misc_feature (2)..(2): 2'-deoxy-2'Fluoro
  misc_feature (4)..(8): 2'-deoxy-2'Fluoro
  misc_feature (10)..(14): 2'-deoxy-2'Fluoro
  misc_feature (16)..(19): 2'-deoxy-2'Fluoro
  misc_feature (1)..(19): ribonucleotide unmodified or modified as described for this sequence
gcgcccucaccccuguccctt

SEQ ID NO: 473 - DNA, 21 bp, Artificial Sequence
  Description of Artificial Sequence: Target Sequence/siNA antisense region (stab08)
  misc_feature (1)..(4): 2'-O-methyl
  misc_feature (5)..(5): 2'-deoxy-2'Fluoro
  misc_feature (6)..(10): 2'-O-methyl
  misc_feature (11)..(11): 2'-deoxy-2'Fluoro
  misc_feature (12)..(16): 2'-O-methyl
  misc_feature (17)..(17): 2'-deoxy-2'Fluoro
  misc_feature (18)..(18): 2'-O-methyl
  misc_feature (19)..(19): 2'-deoxy-2'Fluoro
  misc_feature (20)..(20): Phosphorothioate or Phosphorodithioate 3'-Internucleotide Linkage (optionally present)
  misc_feature (1)..(19): ribonucleotide unmodified or modified as described for this sequence
gggacaggggugagggcgctt

SEQ ID NO: 474 - DNA, 21 bp, Artificial Sequence
  Description of Artificial Sequence: Target Sequence/siNA sense region (stab09)
  misc_feature (1)..(1): 5'-3 attached terminal deoxyabasic moiety, inverted abasic, inverted nucleotide or other terminal cap that is optionally present
  misc_feature (21)..(21): 3'-3 attached terminal deoxyabasic moiety, inverted abasic, inverted nucleotide or other terminal cap that is optionally present
  misc_feature (1)..(19): ribonucleotide unmodified or modified as described for this sequence
gcgcccucaccccuguccctt

SEQ ID NO: 475 - DNA, 21 bp, Artificial Sequence
  Description of Artificial Sequence: Target Sequence/siNA antisense region (stab10)
  misc_feature (20)..(20): Phosphorothioate or Phosphorodithioate 3'-Internucleotide Linkage (optionally present)
  misc_feature (1)..(19): ribonucleotide unmodified or modified as described for this sequence
gggacaggggugagggcgctt

SEQ ID NO: 476 - DNA, 21 bp, Artificial Sequence
  Description of Artificial Sequence: Target Sequence/siNA antisense region (stab19)
  misc_feature (21)..(21): 3'-3 attached terminal deoxyabasic moiety, inverted abasic, inverted nucleotide or other terminal cap that is optionally present
  misc_feature (1)..(4): 2'-O-methyl
  misc_feature (5)..(5): 2'-deoxy-2'Fluoro
  misc_feature (6)..(10): 2'-O-methyl
  misc_feature (11)..(11): 2'-deoxy-2'Fluoro
  misc_feature (12)..(16): 2'-O-methyl
  misc_feature (17)..(17): 2'-deoxy-2'Fluoro
  misc_feature (18)..(18): 2'-O-methyl
  misc_feature (19)..(19): 2'-deoxy-2'Fluoro
  misc_feature (1)..(19): ribonucleotide unmodified or modified as described for this sequence
gggacaggggugagggcgctt

SEQ ID NO: 477 - DNA, 21 bp, Artificial Sequence
  Description of Artificial Sequence: Target Sequence/siNA antisense region (stab22)
  misc_feature (21)..(21): 3'-3 attached terminal deoxyabasic moiety, inverted abasic, inverted nucleotide or other terminal cap that is optionally present
  misc_feature (20)..(20): Phosphorothioate or Phosphorodithioate 3'-Internucleotide Linkage (optionally present)
  misc_feature (1)..(19): ribonucleotide unmodified or modified as described for this sequence
gggacaggggugagggcgctt

SEQ ID NO: 478 - DNA, 21 bp, Artificial Sequence
  Description of Artificial Sequence: Target Sequence/siNA antisense region (stab25)
  misc_feature (4)..(4): 2'-O-methyl
  misc_feature (5)..(5): 2'-deoxy-2'Fluoro
  misc_feature (6)..(10): 2'-O-methyl
  misc_feature (11)..(11): 2'-deoxy-2'Fluoro
  misc_feature (12)..(16): 2'-O-methyl
  misc_feature (17)..(17): 2'-deoxy-2'Fluoro
  misc_feature (18)..(18): 2'-O-methyl
  misc_feature (19)..(19): 2'-deoxy-2'Fluoro
  misc_feature (20)..(20): Phosphorothioate or Phosphorodithioate 3'-Internucleotide Linkage (optionally present)
  misc_feature (1)..(19): ribonucleotide unmodified or modified as described for this sequence
gggacaggggugagggcgctt

SEQ ID NO: 479 - RNA, 21 nt, Artificial Sequence
  Description of Artificial Sequence: Target Sequence/siNA antisense region (stab35)
  misc_feature (4)..(4): 2'-O-methyl
  misc_feature (5)..(5): 2'-deoxy-2'Fluoro
  misc_feature (6)..(10): 2'-O-methyl
  misc_feature (11)..(11): 2'-deoxy-2'Fluoro
  misc_feature (12)..(16): 2'-O-methyl
  misc_feature (17)..(17): 2'-deoxy-2'Fluoro
  misc_feature (18)..(18): 2'-O-methyl
  misc_feature (19)..(19): 2'-deoxy-2'Fluoro
  misc_feature (20)..(21): 2'-O-methyl
gggacaggggugagggcgcuu

SEQ ID NO: 480 - RNA, 21 nt, Artificial Sequence
  Description of Artificial Sequence: Target Sequence/siNA antisense region (stab36)
  misc_feature (4)..(4): 2'-O-methyl
  misc_feature (5)..(5): 2'-deoxy-2'Fluoro
  misc_feature (6)..(10): 2'-O-methyl
  misc_feature (11)..(11): 2'-deoxy-2'Fluoro
  misc_feature (12)..(16): 2'-O-methyl
  misc_feature (17)..(17): 2'-deoxy-2'Fluoro
  misc_feature (18)..(18): 2'-O-methyl
  misc_feature (19)..(19): 2'-deoxy-2'Fluoro
  misc_feature (20)..(21): 2'-O-methyl
gggacaggggugagggcgcug

SEQ ID NO: 481 - RNA, 19 nt, Artificial Sequence
  Description of Artificial Sequence: Target Sequence/siNA sense region
ccuccccagccugcaccca

SEQ ID NO: 482 - RNA, 19 nt, Artificial Sequence
  Description of Artificial Sequence: Target Sequence/siNA antisense region
ugggugcaggcuggggagg

SEQ ID NO: 483 - DNA, 21 bp, Artificial Sequence
  Description of Artificial Sequence: Target Sequence/siNA sense region (stab00)
  misc_feature (1)..(19): ribonucleotide unmodified or modified as described for this sequence
ccuccccagccugcacccatt

SEQ ID NO: 484 - DNA, 21 bp, Artificial Sequence
  Description of Artificial Sequence: Target Sequence/siNA antisense region (stab00as)
  misc_feature (1)..(19): ribonucleotide unmodified or modified as described for this sequence
ugggugcaggcuggggaggtt

SEQ ID NO: 485 - DNA, 21 bp, Artificial Sequence
  Description of Artificial Sequence: Target Sequence/siNA sense region (stab04)
  misc_feature (1)..(1): 5'-3 attached terminal deoxyabasic moiety, inverted abasic, inverted nucleotide or other terminal cap that is optionally present
  misc_feature (21)..(21): 3'-3 attached terminal deoxyabasic moiety, inverted abasic, inverted nucleotide or other terminal cap that is optionally present
  misc_feature (1)..(7): 2'-deoxy-2'Fluoro
  misc_feature (10)..(12): 2'-deoxy-2'Fluoro
  misc_feature (14)..(14): 2'-deoxy-2'Fluoro
  misc_feature (16)..(18): 2'-deoxy-2'Fluoro
  misc_feature (1). .(19): ribonucleotide unmodified or modified as described for this sequence
ccuccccagccugcacccatt

SEQ ID NO: 486 - DNA, 21 bp, Artificial Sequence
  Description of Artificial Sequence: Target Sequence/siNA antisense region (stab05)
  misc_feature (1)..(1): 2'-deoxy-2'Fluoro
  misc_feature (5)..(5): 2'-deoxy-2'Fluoro
  misc_feature (7)..(7): 2'-deoxy-2'Fluoro
  misc_feature (11)..(12): 2'-deoxy-2'Fluoro
  misc_feature (20)..(20): Phosphorothioate or Phosphorodithioate 3'-Internucleotide Linkage (optionally present)
  misc_feature (1). .(19): ribonucleotide unmodified or modified as described for this sequence
ugggugcaggcuggggaggtt

SEQ ID NO: 487 - DNA, 21 bp, Artificial Sequence
  Description of Artificial Sequence: Target Sequence/siNA sense region (stab07)
  misc_feature (1)..(1): 5'-3 attached terminal deoxyabasic moiety, inverted abasic, inverted nucleotide or other terminal cap that is optionally present
  misc_feature (21)..(21): 3'-3 attached terminal deoxyabasic moiety, inverted abasic, inverted nucleotide or other terminal cap that is optionally present
  misc_feature (1)..(7): 2'-deoxy-2'Fluoro
  misc_feature (10)..(12): 2'-deoxy-2'Fluoro
  misc_feature (14)..(14): 2'-deoxy-2'Fluoro
  misc_feature (16)..(18): 2'-deoxy-2'Fluoro
  misc_feature (1)..(19): ribonucleotide unmodified or modified as described for this sequence
ccuccccagccugcacccatt

SEQ ID NO: 488 - DNA, 21 bp, Artificial Sequence
  Description of Artificial Sequence: Target Sequence/siNA antisense region (stab08)
  misc_feature (1)..(1): 2'-deoxy-2'Fluoro
  misc_feature (2)..(4): 2'-O-methyl
  misc_feature (5)..(5): 2'-deoxy-2'Fluoro
  misc_feature (6)..(6): 2'-O-methyl
  misc_feature (7)..(7): 2'-deoxy-2'Fluoro
  misc_feature (8)..(10): 2'-O-methyl
  misc_feature (11)..(12): 2'-deoxy-2'Fluoro
  misc_feature (13)..(19): 2'-O-methyl
  misc_feature (20)..(20): Phosphorothioate or Phosphorodithioate 3'-Internucleotide Linkage (optionally present)
  misc_feature (1)..(19): ribonucleotide unmodified or modified as described for this sequence
ugggugcaggcuggggaggtt

SEQ ID NO: 489 - DNA, 21 bp, Artificial Sequence
  Description of Artificial Sequence: Target Sequence/siNA sense region (stab09)
  misc_feature (1)..(1): 5'-3 attached terminal deoxyabasic moiety, inverted abasic, inverted nucleotide or other terminal cap that is optionally present
  misc_feature (21)..(21): 3'-3 attached terminal deoxyabasic moiety, inverted abasic, inverted nucleotide or other terminal cap that is optionally present
  misc_feature (1)..(19): ribonucleotide unmodified or modified as described for this sequence
ccuccccagccugcacccatt

SEQ ID NO: 490 - DNA, 21 bp, Artificial Sequence
  Description of Artificial Sequence: Target Sequence/siNA antisense region (stab10)
  misc_feature (20)..(20): Phosphorothioate or Phosphorodithioate 3'-Internucleotide Linkage (optionally present)
  misc_feature (1)..(19): ribonucleotide unmodified or modified as described for this sequence
ugggugcaggcuggggaggtt

SEQ ID NO: 491 - DNA, 21 bp, Artificial Sequence
  Description of Artificial Sequence: Target Sequence/siNA antisense region (stab19)
  misc_feature (21)..(21): 3'-3 attached terminal deoxyabasic moiety, inverted abasic, inverted nucleotide or other terminal cap that is optionally present
  misc_feature (1)..(1): 2'-deoxy-2'Fluoro
  misc_feature (2)..(4): 2'-O-methyl
  misc_feature (5)..(5): 2'-deoxy-2'Fluoro
  misc_feature (6)..(6): 2'-O-methyl
  misc_feature (7)..(7): 2'-deoxy-2'Fluoro
  misc_feature (8)..(10): 2'-O-methyl
  misc_feature (11)..(12): 2'-deoxy-2'Fluoro
  misc_feature (13)..(19): 2'-O-methyl
  misc_feature (1)..(19): ribonucleotide unmodified or modified as described for this sequence
ugggugcaggcuggggaggtt

SEQ ID NO: 492 - DNA, 21 bp, Artificial Sequence
  Description of Artificial Sequence: Target Sequence/siNA antisense region (stab22)
  misc_feature (21)..(21): 3'-3 attached terminal deoxyabasic moiety, inverted abasic, inverted nucleotide or other terminal cap that is optionally present
  misc_feature (20)..(20): Phosphorothioate or Phosphorodithioate 3'-Internucleotide Linkage (optionally present)
  misc_feature (1)..(19): ribonucleotide unmodified or modified as described for this sequence
ugggugcaggcuggggaggtt

SEQ ID NO: 493 - DNA, 21 bp, Artificial Sequence
  Description of Artificial Sequence: Target Sequence/siNA antisense region (stab25)
  misc_feature (4)..(4): 2'-O-methyl
  misc_feature (5)..(5): 2'-deoxy-2'Fluoro
  misc_feature (6)..(6): 2'-O-methyl
  misc_feature (7)..(7): 2'-deoxy-2'Fluoro
  misc_feature (8)..(10): 2'-O-methyl
  misc_feature (11)..(12): 2'-deoxy-2'Fluoro
  misc_feature (13)..(19): 2'-O-methyl
  misc_feature (20)..(20): Phosphorothioate or Phosphorodithioate 3'-Internucleotide Linkage (optionally present)
  misc_feature (1). .(19): ribonucleotide unmodified or modified as described for this sequence
ugggugcaggcuggggaggtt

SEQ ID NO: 494 - RNA, 21 nt, Artificial Sequence
  Description of Artificial Sequence: Target Sequence/siNA antisense region (stab35)
  misc_feature (4)..(4): 2'-O-methyl
  misc_feature (5)..(5): 2'-deoxy-2'Fluoro
  misc_feature (6)..(6): 2'-O-methyl
  misc_feature (7)..(7): 2'-deoxy-2'Fluoro
  misc_feature (8)..(10): 2'-O-methyl
  misc_feature (11)..(12): 2'-deoxy-2'Fluoro
  misc_feature (13)..(21): 2'-O-methyl
ugggugcaggcuggggagguu

SEQ ID NO: 495 - RNA, 21 nt, Artificial Sequence
  Description of Artificial Sequence: Target Sequence/siNA antisense region (stab36)
  misc_feature (4)..(4): 2'-O-methyl
  misc_feature (5)..(5): 2'-deoxy-2'Fluoro
  misc_feature (6)..(6): 2'-O-methyl
  misc_feature (7)..(7): 2'-deoxy-2'Fluoro
  misc_feature (8)..(10): 2'-O-methyl
  misc_feature (11)..(12): 2'-deoxy-2'Fluoro
  misc_feature (13)..(21): 2'-O-methyl
ugggugcaggcuggggagggg

SEQ ID NO: 496 - RNA, 19 nt, Artificial Sequence
  Description of Artificial Sequence: Target Sequence/siNA sense region
acuccauugaagauguacc

SEQ ID NO: 497 - RNA, 19 nt, Artificial Sequence
  Description of Artificial Sequence: Target Sequence/siNA antisense region
gguacaucuucaauggagu

SEQ ID NO: 498 - DNA, 21 bp, Artificial Sequence
  Description of Artificial Sequence: Target Sequence/siNA sense region (stab00)
  misc_feature (1)..(19): ribonucleotide unmodified or modified as described for this sequence
acuccauugaagauguacctt

SEQ ID NO: 499 - DNA, 21 bp, Artificial Sequence
  Description of Artificial Sequence: Target Sequence/siNA antisense region (stab00as)
  misc_feature (1)..(19): ribonucleotide unmodified or modified as described for this sequence
gguacaucuucaauggagutt

SEQ ID NO: 500 - DNA, 21 bp, Artificial Sequence
  Description of Artificial Sequence: Target Sequence/siNA sense region (stab04)
  misc_feature (1)..(1): 5'-3 attached terminal deoxyabasic moiety, inverted abasic, inverted nucleotide or other terminal cap that is optionally present
  misc_feature (21)..(21): 3'-3 attached terminal deoxyabasic moiety, inverted abasic, inverted nucleotide or other terminal cap that is optionally present
  misc_feature (2)..(5): 2'-deoxy-2'Fluoro
  misc_feature (7)..(8): 2'-deoxy-2'Fluoro
  misc_feature (14)..(14): 2'-deoxy-2'Fluoro
  misc_feature (16)..(16): 2'-deoxy-2'Fluoro
  misc_feature (18)..(19): 2'-deoxy-2'Fluoro
  misc_feature (1). .(19): ribonucleotide unmodified or modified as described for this sequence
acuccauugaagauguacctt

SEQ ID NO: 501 - DNA, 21 bp, Artificial Sequence
  Description of Artificial Sequence: Target Sequence/siNA antisense region (stab05)
  misc_feature (3)..(3): 2'-deoxy-2'Fluoro
  misc_feature (5)..(5): 2'-deoxy-2'Fluoro
  misc_feature (7)..(11): 2'-deoxy-2'Fluoro
  misc_feature (14)..(14): 2'-deoxy-2'Fluoro
  misc_feature (19)..(19): 2'-deoxy-2'Fluoro
  misc_feature (20)..(20): Phosphorothioate or Phosphorodithioate 3'-Internucleotide Linkage (optionally present)
  misc_feature (1). .(19): ribonucleotide unmodified or modified as described for this sequence
gguacaucuucaauggagutt

SEQ ID NO: 502 - DNA, 21 bp, Artificial Sequence
  Description of Artificial Sequence: Target Sequence/siNA sense region (stab07)
  misc_feature (1)..(1): 5'-3 attached terminal deoxyabasic moiety, inverted abasic, inverted nucleotide or other terminal cap that is optionally present
  misc_feature (21)..(21): 3'-3 attached terminal deoxyabasic moiety, inverted abasic, inverted nucleotide or other terminal cap that is optionally present
  misc_feature (2)..(5): 2'-deoxy-2'Fluoro
  misc_feature (7)..(8): 2'-deoxy-2'Fluoro
  misc_feature (14)..(14): 2'-deoxy-2'Fluoro
  misc_feature (16)..(16): 2'-deoxy-2'Fluoro
  misc_feature (18)..(19): 2'-deoxy-2'Fluoro
  misc_feature (1)..(19): ribonucleotide unmodified or modified as described for this sequence
acuccauugaagauguacctt

SEQ ID NO: 503 - DNA, 21 bp, Artificial Sequence
  Description of Artificial Sequence: Target Sequence/siNA antisense region (stab08)
  misc_feature (1)..(2): 2'-O-methyl
  misc_feature (3)..(3): 2'-deoxy-2'Fluoro
  misc_feature (4)..(4): 2'-O-methyl
  misc_feature (5)..(5): 2'-deoxy-2'Fluoro
  misc_feature (6)..(6): 2'-O-methyl
  misc_feature (7)..(11): 2'-deoxy-2'Fluoro
  misc_feature (12)..(13): 2'-O-methyl
  misc_feature (14)..(14): 2'-deoxy-2'Fluoro
  misc_feature (15)..(18): 2'-O-methyl
  misc_feature (19)..(19): 2'-deoxy-2'Fluoro
  misc_feature (20)..(20): Phosphorothioate or Phosphorodithioate 3'-Internucleotide Linkage (optionally present)
  misc_feature (1)..(19): ribonucleotide unmodified or modified as described for this sequence
gguacaucuucaauggagutt

SEQ ID NO: 504 - DNA, 21 bp, Artificial Sequence
  Description of Artificial Sequence: Target Sequence/siNA sense region (stab09)
  misc_feature (1)..(1): 5'-3 attached terminal deoxyabasic moiety, inverted abasic, inverted nucleotide or other terminal cap that is optionally present
  misc_feature (21)..(21): 3'-3 attached terminal deoxyabasic moiety, inverted abasic, inverted nucleotide or other terminal cap that is optionally present
  misc_feature (1)..(19): ribonucleotide unmodified or modified as described for this sequence
acuccauugaagauguacctt

SEQ ID NO: 505 - DNA, 21 bp, Artificial Sequence
  Description of Artificial Sequence: Target Sequence/siNA antisense region (stab10)
  misc_feature (20)..(20): Phosphorothioate or Phosphorodithioate 3'-Internucleotide Linkage (optionally present)
  misc_feature (1)..(19): ribonucleotide unmodified or modified as described for this sequence
gguacaucuucaauggagutt

SEQ ID NO: 506 - DNA, 21 bp, Artificial Sequence
  Description of Artificial Sequence: Target Sequence/siNA antisense region (stab19)
  misc_feature (21)..(21): 3'-3 attached terminal deoxyabasic moiety, inverted abasic, inverted nucleotide or other terminal cap that is optionally present
  misc_feature (1)..(2): 2'-O-methyl
  misc_feature (3)..(3): 2'-deoxy-2'Fluoro
  misc_feature (4)..(4): 2'-O-methyl
  misc_feature (5)..(5): 2'-deoxy-2'Fluoro
  misc_feature (6)..(6): 2'-O-methyl
  misc_feature (7)..(11): 2'-deoxy-2'Fluoro
  misc_feature (12)..(13): 2'-O-methyl
  misc_feature (14)..(14): 2'-deoxy-2'Fluoro
  misc_feature (15)..(18): 2'-O-methyl
  misc_feature (19)..(19): 2'-deoxy-2'Fluoro
  misc_feature (1)..(19): ribonucleotide unmodified or modified as described for this sequence
gguacaucuucaauggagutt

SEQ ID NO: 507 - DNA, 21 bp, Artificial Sequence
  Description of Artificial Sequence: Target Sequence/siNA antisense region (stab22)
  misc_feature (21)..(21): 3'-3 attached terminal deoxyabasic moiety, inverted abasic, inverted nucleotide or other terminal cap that is optionally present
  misc_feature (20)..(20): Phosphorothioate or Phosphorodithioate 3'-Internucleotide Linkage (optionally present)
  misc_feature (1)..(19): ribonucleotide unmodified or modified as described for this sequence
gguacaucuucaauggagutt

SEQ ID NO: 508 - DNA, 21 bp, Artificial Sequence
  Description of Artificial Sequence: Target Sequence/siNA antisense region (stab25)
  misc_feature (4)..(4): 2'-O-methyl
  misc_feature (5)..(5): 2'-deoxy-2'Fluoro
  misc_feature (6)..(6): 2'-O-methyl
  misc_feature (7)..(11): 2'-deoxy-2'Fluoro
  misc_feature (12)..(13): 2'-O-methyl
  misc_feature (14)..(14): 2'-deoxy-2'Fluoro
  misc_feature (15)..(18): 2'-O-methyl
  misc_feature (19)..(19): 2'-deoxy-2'Fluoro
  misc_feature (20)..(20): Phosphorothioate or Phosphorodithioate 3'-Internucleotide Linkage (optionally present)
  misc_feature (1). .(19): ribonucleotide unmodified or modified as described for this sequence
gguacaucuucaauggagutt

SEQ ID NO: 509 - RNA, 21 nt, Artificial Sequence
  Description of Artificial Sequence: Target Sequence/siNA antisense region (stab35)
  misc_feature (4)..(4): 2'-O-methyl
  misc_feature (5)..(5): 2'-deoxy-2'Fluoro
  misc_feature (6)..(6): 2'-O-methyl
  misc_feature (7)..(11): 2'-deoxy-2'Fluoro
  misc_feature (12)..(13): 2'-O-methyl
  misc_feature (14)..(14): 2'-deoxy-2'Fluoro
  misc_feature (15)..(18): 2'-O-methyl
  misc_feature (19)..(19): 2'-deoxy-2'Fluoro
  misc_feature (20)..(21): 2'-O-methyl
gguacaucuucaauggaguuu

SEQ ID NO: 510 - RNA, 21 nt, Artificial Sequence
  Description of Artificial Sequence: Target Sequence/siNA antisense region (stab36)
  misc_feature (4)..(4): 2'-O-methyl
  misc_feature (5)..(5): 2'-deoxy-2'Fluoro
  misc_feature (6)..(6): 2'-O-methyl
  misc_feature (7)..(11): 2'-deoxy-2'Fluoro
  misc_feature (12)..(13): 2'-O-methyl
  misc_feature (14)..(14): 2'-deoxy-2'Fluoro
  misc_feature (15)..(18): 2'-O-methyl
  misc_feature (19)..(19): 2'-deoxy-2'Fluoro
  misc_feature (20)..(21): 2'-O-methyl
gguacaucuucaauggagugg

SEQ ID NO: 511 - RNA, 19 nt, Artificial Sequence
  Description of Artificial Sequence: Target Sequence/siNA sense region
ccguccaugcccgcuuucu

SEQ ID NO: 512 - RNA, 19 nt, Artificial Sequence
  Description of Artificial Sequence: Target Sequence/siNA antisense region
agaaagcgggcauggacgg

SEQ ID NO: 513 - DNA, 21 bp, Artificial Sequence
  Description of Artificial Sequence: Target Sequence/siNA sense region (stab00)
  misc_feature (1)..(19): ribonucleotide unmodified or modified as described for this sequence
ccguccaugcccgcuuucutt

SEQ ID NO: 514 - DNA, 21 bp, Artificial Sequence
  Description of Artificial Sequence: Target Sequence/siNA antisense region (stab00as)
  misc_feature (1)..(19): ribonucleotide unmodified or modified as described for this sequence
agaaagcgggcauggacggtt

SEQ ID NO: 515 - DNA, 21 bp, Artificial Sequence
  Description of Artificial Sequence: Target Sequence/siNA sense region (stab04)
  misc_feature (1)..(1): 5'-3 attached terminal deoxyabasic moiety, inverted abasic, inverted nucleotide or other terminal cap that is optionally present
  misc_feature (21)..(21): 3'-3 attached terminal deoxyabasic moiety, inverted abasic, inverted nucleotide or other terminal cap that is optionally present
  misc_feature (1)..(2): 2'-deoxy-2'Fluoro
  misc_feature (4)..(6): 2'-deoxy-2'Fluoro
  misc_feature (8)..(8): 2'-deoxy-2'Fluoro
  misc_feature (10)..(12): 2'-deoxy-2'Fluoro
  misc_feature (14)..(19): 2'-deoxy-2'Fluoro
  misc_feature (1). .(19): ribonucleotide unmodified or modified as described for this sequence
ccguccaugcccgcuuucutt

SEQ ID NO: 516 - DNA, 21 bp, Artificial Sequence
  Description of Artificial Sequence: Target Sequence/siNA antisense region (stab05)
  misc_feature (7)..(7): 2'-deoxy-2'Fluoro
  misc_feature (11)..(11): 2'-deoxy-2'Fluoro
  misc_feature (13)..(13): 2'-deoxy-2'Fluoro
  misc_feature (17)..(17): 2'-deoxy-2'Fluoro
  misc_feature (20)..(20): Phosphorothioate or Phosphorodithioate 3'-Internucleotide Linkage (optionally present)
  misc_feature (1). .(19): ribonucleotide unmodified or modified as described for this sequence
agaaagcgggcauggacggtt

SEQ ID NO: 517 - DNA, 21 bp, Artificial Sequence
  Description of Artificial Sequence: Target Sequence/siNA sense region (stab07)
  misc_feature (1)..(1): 5'-3 attached terminal deoxyabasic moiety, inverted abasic, inverted nucleotide or other terminal cap that is optionally present
  misc_feature (21)..(21): 3'-3 attached terminal deoxyabasic moiety, inverted abasic, inverted nucleotide or other terminal cap that is optionally present
  misc_feature (1)..(2): 2'-deoxy-2'Fluoro
  misc_feature (4)..(6): 2'-deoxy-2'Fluoro
  misc_feature (8)..(8): 2'-deoxy-2'Fluoro
  misc_feature (10)..(12): 2'-deoxy-2'Fluoro
  misc_feature (14)..(19): 2'-deoxy-2'Fluoro
  misc_feature (1)..(19): ribonucleotide unmodified or modified as described for this sequence
ccguccaugcccgcuuucutt

SEQ ID NO: 518 - DNA, 21 bp, Artificial Sequence
  Description of Artificial Sequence: Target Sequence/siNA antisense region (stab08)
  misc_feature (1)..(6): 2'-O-methyl
  misc_feature (7)..(7): 2'-deoxy-2'Fluoro
  misc_feature (8)..(10): 2'-O-methyl
  misc_feature (11)..(11): 2'-deoxy-2'Fluoro
  misc_feature (12)..(12): 2'-O-methyl
  misc_feature (13)..(13): 2'-deoxy-2'Fluoro
  misc_feature (14)..(16): 2'-O-methyl
  misc_feature (17)..(17): 2'-deoxy-2'Fluoro
  misc_feature (18)..(19): 2'-O-methyl
  misc_feature (20)..(20): Phosphorothioate or Phosphorodithioate 3'-Internucleotide Linkage (optionally present)
  misc_feature (1)..(19): ribonucleotide unmodified or modified as described for this sequence
agaaagcgggcauggacggtt

SEQ ID NO: 519 - DNA, 21 bp, Artificial Sequence
  Description of Artificial Sequence: Target Sequence/siNA sense region (stab09)
  misc_feature (1)..(1): 5'-3 attached terminal deoxyabasic moiety, inverted abasic, inverted nucleotide or other terminal cap that is optionally present
  misc_feature (21)..(21): 3'-3 attached terminal deoxyabasic moiety, inverted abasic, inverted nucleotide or other terminal cap that is optionally present
  misc_feature (1)..(19): ribonucleotide unmodified or modified as described for this sequence
ccguccaugcccgcuuucutt

SEQ ID NO: 520 - DNA, 21 bp, Artificial Sequence
  Description of Artificial Sequence: Target Sequence/siNA antisense region (stab10)
  misc_feature (20)..(20): Phosphorothioate or Phosphorodithioate 3'-Internucleotide Linkage (optionally present)
  misc_feature (1)..(19): ribonucleotide unmodified or modified as described for this sequence
agaaagcgggcauggacggtt

SEQ ID NO: 521 - DNA, 21 bp, Artificial Sequence
  Description of Artificial Sequence: Target Sequence/siNA antisense region (stab19)
  misc_feature (21)..(21): 3'-3 attached terminal deoxyabasic moiety, inverted abasic, inverted nucleotide or other terminal cap that is optionally present
  misc_feature (1)..(6): 2'-O-methyl
  misc_feature (7)..(7): 2'-deoxy-2'Fluoro
  misc_feature (8)..(10): 2'-O-methyl
  misc_feature (11)..(11): 2'-deoxy-2'Fluoro
  misc_feature (12)..(12): 2'-O-methyl
  misc_feature (13)..(13): 2'-deoxy-2'Fluoro
  misc_feature (14)..(16): 2'-O-methyl
  misc_feature (17)..(17): 2'-deoxy-2'Fluoro
  misc_feature (18)..(19): 2'-O-methyl
  misc_feature (1)..(19): ribonucleotide unmodified or modified as described for this sequence
agaaagcgggcauggacggtt

SEQ ID NO: 522 - DNA, 21 bp, Artificial Sequence
  Description of Artificial Sequence: Target Sequence/siNA antisense region (stab22)
  misc_feature (21)..(21): 3'-3 attached terminal deoxyabasic moiety, inverted abasic, inverted nucleotide or other terminal cap that is optionally present
  misc_feature (20)..(20): Phosphorothioate or Phosphorodithioate 3'-Internucleotide Linkage (optionally present)
  misc_feature (1)..(19): ribonucleotide unmodified or modified as described for this sequence
agaaagcgggcauggacggtt

SEQ ID NO: 523 - DNA, 21 bp, Artificial Sequence
  Description of Artificial Sequence: Target Sequence/siNA antisense region (stab25)
  misc_feature (4)..(6): 2'-O-methyl
  misc_feature (7)..(7): 2'-deoxy-2'Fluoro
  misc_feature (8)..(10): 2'-O-methyl
  misc_feature (11)..(11): 2'-deoxy-2'Fluoro
  misc_feature (12)..(12): 2'-O-methyl
  misc_feature (13)..(13): 2'-deoxy-2'Fluoro
  misc_feature (14)..(16): 2'-O-methyl
  misc_feature (17)..(17): 2'-deoxy-2'Fluoro
  misc_feature (18)..(19): 2'-O-methyl
  misc_feature (20)..(20): Phosphorothioate or Phosphorodithioate 3'-Internucleotide Linkage (optionally present)
  misc_feature (1). .(19): ribonucleotide unmodified or modified as described for this sequence
agaaagcgggcauggacggtt

SEQ ID NO: 524 - RNA, 21 nt, Artificial Sequence
  Description of Artificial Sequence: Target Sequence/siNA antisense region (stab35)
  misc_feature (4)..(6): 2'-O-methyl
  misc_feature (7)..(7): 2'-deoxy-2'Fluoro
  misc_feature (8)..(10): 2'-O-methyl
  misc_feature (11)..(11): 2'-deoxy-2'Fluoro
  misc_feature (12)..(12): 2'-O-methyl
  misc_feature (13)..(13): 2'-deoxy-2'Fluoro
  misc_feature (14)..(16): 2'-O-methyl
  misc_feature (17)..(17): 2'-deoxy-2'Fluoro
  misc_feature (18)..(21): 2'-O-methyl
agaaagcgggcauggacgguu

SEQ ID NO: 525 - RNA, 21 nt, Artificial Sequence
  Description of Artificial Sequence: Target Sequence/siNA antisense region (stab36)
  misc_feature (4)..(6): 2'-O-methyl
  misc_feature (7)..(7): 2'-deoxy-2'Fluoro
  misc_feature (8)..(10): 2'-O-methyl
  misc_feature (11)..(11): 2'-deoxy-2'Fluoro
  misc_feature (12)..(12): 2'-O-methyl
  misc_feature (13)..(13): 2'-deoxy-2'Fluoro
  misc_feature (14)..(16): 2'-O-methyl
  misc_feature (17)..(17): 2'-deoxy-2'Fluoro
  misc_feature (18)..(21): 2'-O-methyl
agaaagcgggcauggacgggu

SEQ ID NO: 526 - RNA, 19 nt, Artificial Sequence
  Description of Artificial Sequence: Target Sequence/siNA sense region
uccccugggccugguauca

SEQ ID NO: 527 - RNA, 19 nt, Artificial Sequence
  Description of Artificial Sequence: Target Sequence/siNA antisense region
ugauaccaggcccagggga

SEQ ID NO: 528 - DNA, 21 bp, Artificial Sequence
  Description of Artificial Sequence: Target Sequence/siNA sense region (stab00)
  misc_feature (1)..(19): ribonucleotide unmodified or modified as described for this sequence
uccccugggccugguaucatt

SEQ ID NO: 529 - DNA, 21 bp, Artificial Sequence
  Description of Artificial Sequence: Target Sequence/siNA antisense region (stab00as)
  misc_feature (1)..(19): ribonucleotide unmodified or modified as described for this sequence
ugauaccaggcccaggggatt

SEQ ID NO: 530 - DNA, 21 bp, Artificial Sequence
  Description of Artificial Sequence: Target Sequence/siNA sense region (stab04)
  misc_feature (1)..(1): 5'-3 attached terminal deoxyabasic moiety, inverted abasic, inverted nucleotide or other terminal cap that is optionally present
  misc_feature (21)..(21): 3'-3 attached terminal deoxyabasic moiety, inverted abasic, inverted nucleotide or other terminal cap that is optionally present
  misc_feature (1)..(6): 2'-deoxy-2'Fluoro
  misc_feature (10)..(12): 2'-deoxy-2'Fluoro
  misc_feature (15)..(15): 2'-deoxy-2'Fluoro
  misc_feature (17)..(18): 2'-deoxy-2'Fluoro
  misc_feature (1). .(19): ribonucleotide unmodified or modified as described for this sequence
uccccugggccugguaucatt

SEQ ID NO: 531 - DNA, 21 bp, Artificial Sequence
  Description of Artificial Sequence: Target Sequence/siNA antisense region (stab05)
  misc_feature (1)..(1): 2'-deoxy-2'Fluoro
  misc_feature (4)..(4): 2'-deoxy-2'Fluoro
  misc_feature (6)..(7): 2'-deoxy-2'Fluoro
  misc_feature (11)..(13): 2'-deoxy-2'Fluoro
  misc_feature (20)..(20): Phosphorothioate or Phosphorodithioate 3'-Internucleotide Linkage (optionally present)
  misc_feature (1). .(19): ribonucleotide unmodified or modified as described for this sequence
ugauaccaggcccaggggatt

SEQ ID NO: 532 - DNA, 21 bp, Artificial Sequence
  Description of Artificial Sequence: Target Sequence/siNA sense region (stab07)
  misc_feature (1)..(1): 5'-3 attached terminal deoxyabasic moiety, inverted abasic, inverted nucleotide or other terminal cap that is optionally present
  misc_feature (21)..(21): 3'-3 attached terminal deoxyabasic moiety, inverted abasic, inverted nucleotide or other terminal cap that is optionally present
  misc_feature (1)..(6): 2'-deoxy-2'Fluoro
  misc_feature (10)..(12): 2'-deoxy-2'Fluoro
  misc_feature (15)..(15): 2'-deoxy-2'Fluoro
  misc_feature (17)..(18): 2'-deoxy-2'Fluoro
uccccugggccugguaucatt

SEQ ID NO: 533 - DNA, 21 bp, Artificial Sequence
  Description of Artificial Sequence: Target Sequence/siNA antisense region (stab08)
  misc_feature (1)..(1): 2'-deoxy-2'Fluoro
  misc_feature (2)..(3): 2'-O-methyl
  misc_feature (4)..(4): 2'-deoxy-2'Fluoro
  misc_feature (5)..(5): 2'-O-methyl
  misc_feature (6)..(7): 2'-deoxy-2'Fluoro
  misc_feature (8)..(10): 2'-O-methyl
  misc_feature (11)..(13): 2'-deoxy-2'Fluoro
  misc_feature (14)..(19): 2'-O-methyl
  misc_feature (20)..(20): Phosphorothioate or Phosphorodithioate 3'-Internucleotide Linkage (optionally present)
  misc_feature (1)..(19): ribonucleotide unmodified or modified as described for this sequence
ugauaccaggcccaggggatt

SEQ ID NO: 534 - DNA, 21 bp, Artificial Sequence
  Description of Artificial Sequence: Target Sequence/siNA sense region (stab09)
  misc_feature (1)..(1): 5'-3 attached terminal deoxyabasic moiety, inverted abasic, inverted nucleotide or other terminal cap that is optionally present
  misc_feature (21)..(21): 3'-3 attached terminal deoxyabasic moiety, inverted abasic, inverted nucleotide or other terminal cap that is optionally present
  misc_feature (1)..(19): ribonucleotide unmodified or modified as described for this sequence
uccccugggccugguaucatt

SEQ ID NO: 535 - DNA, 21 bp, Artificial Sequence
  Description of Artificial Sequence: Target Sequence/siNA antisense region (stab10)
  misc_feature (20)..(20): Phosphorothioate or Phosphorodithioate 3'-Internucleotide Linkage (optionally present)
  misc_feature (1)..(19): ribonucleotide unmodified or modified as described for this sequence
ugauaccaggcccaggggatt

SEQ ID NO: 536 - DNA, 21 bp, Artificial Sequence
  Description of Artificial Sequence: Target Sequence/siNA antisense region (stab19)
  misc_feature (21)..(21): 3'-3 attached terminal deoxyabasic moiety, inverted abasic, inverted nucleotide or other terminal cap that is optionally present
  misc_feature (1)..(1): 2'-deoxy-2'Fluoro
  misc_feature (2)..(3): 2'-O-methyl
  misc_feature (4)..(4): 2'-deoxy-2'Fluoro
  misc_feature (5)..(5): 2'-O-methyl
  misc_feature (6)..(7): 2'-deoxy-2'Fluoro
  misc_feature (8)..(10): 2'-O-methyl
  misc_feature (11)..(13): 2'-deoxy-2'Fluoro
  misc_feature (14)..(19): 2'-O-methyl
  misc_feature (1)..(19): ribonucleotide unmodified or modified as described for this sequence
ugauaccaggcccaggggatt

SEQ ID NO: 537 - DNA, 21 bp, Artificial Sequence
  Description of Artificial Sequence: Target Sequence/siNA antisense region (stab22)
  misc_feature (21)..(21): 3'-3 attached terminal deoxyabasic moiety, inverted abasic, inverted nucleotide or other terminal cap that is optionally present
  misc_feature (20)..(20): Phosphorothioate or Phosphorodithioate 3'-Internucleotide Linkage (optionally present)
  misc_feature (1)..(19): ribonucleotide unmodified or modified as described for this sequence
ugauaccaggcccaggggatt

SEQ ID NO: 538 - DNA, 21 bp, Artificial Sequence
  Description of Artificial Sequence: Target Sequence/siNA antisense region (stab25)
  misc_feature (4)..(4): 2'-deoxy-2'Fluoro
  misc_feature (5)..(5): 2'-O-methyl
  misc_feature (6)..(7): 2'-deoxy-2'Fluoro
  misc_feature (8)..(10): 2'-O-methyl
  misc_feature (11)..(13): 2'-deoxy-2'Fluoro
  misc_feature (14)..(19): 2'-O-methyl
  misc_feature (20)..(20): Phosphorothioate or Phosphorodithioate 3'-Internucleotide Linkage (optionally present)
  misc_feature (1). .(19): ribonucleotide unmodified or modified as described for this sequence
ugauaccaggcccaggggatt

SEQ ID NO: 539 - RNA, 21 nt, Artificial Sequence
  Description of Artificial Sequence: Target Sequence/siNA antisense region (stab35)
  misc_feature (4)..(4): 2'-deoxy-2'Fluoro
  misc_feature (5)..(5): 2'-O-methyl
  misc_feature (6)..(7): 2'-deoxy-2'Fluoro
  misc_feature (8)..(10): 2'-O-methyl
  misc_feature (11)..(13): 2'-deoxy-2'Fluoro
  misc_feature (14)..(21): 2'-O-methyl
ugauaccaggcccaggggauu

SEQ ID NO: 540 - RNA, 21 nt, Artificial Sequence
  Description of Artificial Sequence: Target Sequence/siNA antisense region (stab36)
  misc_feature (4)..(4): 2'-deoxy-2'Fluoro
  misc_feature (5)..(5): 2'-O-methyl
  misc_feature (6)..(7): 2'-deoxy-2'Fluoro
  misc_feature (8)..(10): 2'-O-methyl
  misc_feature (11)..(13): 2'-deoxy-2'Fluoro
  misc_feature (14)..(21): 2'-O-methyl
ugauaccaggcccaggggaga

SEQ ID NO: 541 - RNA, 19 nt, Artificial Sequence
  Description of Artificial Sequence: Target Sequence/siNA sense region
aaggaagagucagugccac

SEQ ID NO: 542 - RNA, 19 nt, Artificial Sequence
  Description of Artificial Sequence: Target Sequence/siNA antisense region
guggcacugacucuuccuu

SEQ ID NO: 543 - DNA, 21 bp, Artificial Sequence
  Description of Artificial Sequence: Target Sequence/siNA sense region (stab00)
  misc_feature (1)..(19): ribonucleotide unmodified or modified as described for this sequence
aaggaagagucagugccactt

SEQ ID NO: 544 - DNA, 21 bp, Artificial Sequence
  Description of Artificial Sequence: Target Sequence/siNA antisense region (stab00as)
  misc_feature (1)..(19): ribonucleotide unmodified or modified as described for this sequence
guggcacugacucuuccuutt

SEQ ID NO: 545 - DNA, 21 bp, Artificial Sequence
  Description of Artificial Sequence: Target Sequence/siNA sense region (stab04)
  misc_feature (1)..(1): 5'-3 attached terminal deoxyabasic moiety, inverted abasic, inverted nucleotide or other terminal cap that is optionally present
  misc_feature (21)..(21): 3'-3 attached terminal deoxyabasic moiety, inverted abasic, inverted nucleotide or other terminal cap that is optionally present
  misc_feature (10)..(11): 2'-deoxy-2'Fluoro
  misc_feature (14)..(14): 2'-deoxy-2'Fluoro
  misc_feature (16)..(17): 2'-deoxy-2'Fluoro
  misc_feature (19)..(19): 2'-deoxy-2'Fluoro
  misc_feature (1). .(19): ribonucleotide unmodified or modified as described for this sequence
aaggaagagucagugccactt

SEQ ID NO: 546 - DNA, 21 bp, Artificial Sequence
  Description of Artificial Sequence: Target Sequence/siNA antisense region (stab05)
  misc_feature (2)..(2): 2'-deoxy-2'Fluoro
  misc_feature (5)..(5): 2'-deoxy-2'Fluoro
  misc_feature (7)..(8): 2'-deoxy-2'Fluoro
  misc_feature (11)..(19): 2'-deoxy-2'Fluoro
  misc_feature (20)..(20): Phosphorothioate or Phosphorodithioate 3'-Internucleotide Linkage (optionally present)
  misc_feature (1). .(19): ribonucleotide unmodified or modified as described for this sequence
guggcacugacucuuccuutt

SEQ ID NO: 547 - DNA, 21 bp, Artificial Sequence
  Description of Artificial Sequence: Target Sequence/siNA sense region (stab07)
  misc_feature (1)..(1): 5'-3 attached terminal deoxyabasic moiety, inverted abasic, inverted nucleotide or other terminal cap that is optionally present
  misc_feature (21)..(21): 3'-3 attached terminal deoxyabasic moiety, inverted abasic, inverted nucleotide or other terminal cap that is optionally present
  misc_feature (10)..(11): 2'-deoxy-2'Fluoro
  misc_feature (14)..(14): 2'-deoxy-2'Fluoro
  misc_feature (16)..(17): 2'-deoxy-2'Fluoro
  misc_feature (19)..(19): 2'-deoxy-2'Fluoro
  misc_feature (1)..(19): ribonucleotide unmodified or modified as described for this sequence
aaggaagagucagugccactt

SEQ ID NO: 548 - DNA, 21 bp, Artificial Sequence
  Description of Artificial Sequence: Target Sequence/siNA antisense region (stab08)
  misc_feature (1)..(1): 2'-O-methyl
  misc_feature (2)..(2): 2'-deoxy-2'Fluoro
  misc_feature (3)..(4): 2'-O-methyl
  misc_feature (5)..(5): 2'-deoxy-2'Fluoro
  misc_feature (6)..(6): 2'-O-methyl
  misc_feature (7)..(8): 2'-deoxy-2'Fluoro
  misc_feature (9)..(10): 2'-O-methyl
  misc_feature (11)..(19): 2'-deoxy-2'Fluoro
  misc_feature (20)..(20): Phosphorothioate or Phosphorodithioate 3'-Internucleotide Linkage (optionally present)
  misc_feature (1)..(19): ribonucleotide unmodified or modified as described for this sequence
guggcacugacucuuccuutt

SEQ ID NO: 549 - DNA, 21 bp, Artificial Sequence
  Description of Artificial Sequence: Target Sequence/siNA sense region (stab09)
  misc_feature (1)..(1): 5'-3 attached terminal deoxyabasic moiety, inverted abasic, inverted nucleotide or other terminal cap that is optionally present
  misc_feature (21)..(21): 3'-3 attached terminal deoxyabasic moiety, inverted abasic, inverted nucleotide or other terminal cap that is optionally present
  misc_feature (1)..(19): ribonucleotide unmodified or modified as described for this sequence
aaggaagagucagugccactt

SEQ ID NO: 550 - DNA, 21 bp, Artificial Sequence
  Description of Artificial Sequence: Target Sequence/siNA antisense region (stab10)
  misc_feature (20)..(20): Phosphorothioate or Phosphorodithioate 3'-Internucleotide Linkage (optionally present)
  misc_feature (1)..(19): ribonucleotide unmodified or modified as described for this sequence
guggcacugacucuuccuutt

SEQ ID NO: 551 - DNA, 21 bp, Artificial Sequence
  Description of Artificial Sequence: Target Sequence/siNA antisense region (stab19)
  misc_feature (21)..(21): 3'-3 attached terminal deoxyabasic moiety, inverted abasic, inverted nucleotide or other terminal cap that is optionally present
  misc_feature (1)..(1): 2'-O-methyl
  misc_feature (2)..(2): 2'-deoxy-2'Fluoro
  misc_feature (3)..(4): 2'-O-methyl
  misc_feature (5)..(5): 2'-deoxy-2'Fluoro
  misc_feature (6)..(6): 2'-O-methyl
  misc_feature (7)..(8): 2'-deoxy-2'Fluoro
  misc_feature (9)..(10): 2'-O-methyl
  misc_feature (11)..(19): 2'-deoxy-2'Fluoro
  misc_feature (1)..(19): ribonucleotide unmodified or modified as described for this sequence
guggcacugacucuuccuutt

SEQ ID NO: 552 - DNA, 21 bp, Artificial Sequence
  Description of Artificial Sequence: Target Sequence/siNA antisense region (stab22)
  misc_feature (21)..(21): 3'-3 attached terminal deoxyabasic moiety, inverted abasic, inverted nucleotide or other terminal cap that is optionally present
  misc_feature (20)..(20): Phosphorothioate or Phosphorodithioate 3'-Internucleotide Linkage (optionally present)
  misc_feature (1)..(19): ribonucleotide unmodified or modified as described for this sequence
guggcacugacucuuccuutt

SEQ ID NO: 553 - DNA, 21 bp, Artificial Sequence
  Description of Artificial Sequence: Target Sequence/siNA antisense region (stab25)
  misc_feature (4)..(4): 2'-O-methyl
  misc_feature (5)..(5): 2'-deoxy-2'Fluoro
  misc_feature (6)..(6): 2'-O-methyl
  misc_feature (7)..(8): 2'-deoxy-2'Fluoro
  misc_feature (9)..(10): 2'-O-methyl
  misc_feature (11)..(19): 2'-deoxy-2'Fluoro
  misc_feature (20)..(20): Phosphorothioate or Phosphorodithioate 3'-Internucleotide Linkage (optionally present)
  misc_feature (1)..(3): ribonucleotide
guggcacugacucuuccuutt

SEQ ID NO: 554 - RNA, 21 nt, Artificial Sequence
  Description of Artificial Sequence: Target Sequence/siNA antisense region (stab35)
  misc_feature (4)..(4): 2'-O-methyl
  misc_feature (5)..(5): 2'-deoxy-2'Fluoro
  misc_feature (6)..(6): 2'-O-methyl
  misc_feature (7)..(8): 2'-deoxy-2'Fluoro
  misc_feature (9)..(10): 2'-O-methyl
  misc_feature (11)..(19): 2'-deoxy-2'Fluoro
  misc_feature (20)..(21): 2'-O-methyl
guggcacugacucuuccuuuu

SEQ ID NO: 555 - RNA, 21 nt, Artificial Sequence
  Description of Artificial Sequence: Target Sequence/siNA antisense region (stab36)
  misc_feature (4)..(4): 2'-O-methyl
  misc_feature (5)..(5): 2'-deoxy-2'Fluoro
  misc_feature (6)..(6): 2'-O-methyl
  misc_feature (7)..(8): 2'-deoxy-2'Fluoro
  misc_feature (9)..(10): 2'-O-methyl
  misc_feature (11)..(19): 2'-deoxy-2'Fluoro
  misc_feature (20)..(21): 2'-O-methyl
guggcacugacucuuccuuga

SEQ ID NO: 556 - RNA, 19 nt, Artificial Sequence
  Description of Artificial Sequence: Target Sequence/siNA sense region
cugagcauccugcagaccc

SEQ ID NO: 557 - RNA, 19 nt, Artificial Sequence
  Description of Artificial Sequence: Target Sequence/siNA antisense region
gggucugcaggaugcucag

SEQ ID NO: 558 - DNA, 21 bp, Artificial Sequence
  Description of Artificial Sequence: Target Sequence/siNA sense region (stab00)
  misc_feature (1)..(19): ribonucleotide unmodified or modified as described for this sequence
cugagcauccugcagaccctt

SEQ ID NO: 559 - DNA, 21 bp, Artificial Sequence
  Description of Artificial Sequence: Target Sequence/siNA antisense region (stab00as)
  misc_feature (1)..(19): ribonucleotide unmodified or modified as described for this sequence
gggucugcaggaugcucagtt

SEQ ID NO: 560 - DNA, 21 bp, Artificial Sequence
  Description of Artificial Sequence: Target Sequence/siNA sense region (stab04)
  misc_feature (1)..(1): 5'-3 attached terminal deoxyabasic moiety, inverted abasic, inverted nucleotide or other terminal cap that is optionally present
  misc_feature (21)..(21): 3'-3 attached terminal deoxyabasic moiety, inverted abasic, inverted nucleotide or other terminal cap that is optionally present
  misc_feature (1)..(2): 2'-deoxy-2'Fluoro
  misc_feature (6)..(6): 2'-deoxy-2'Fluoro
  misc_feature (8)..(11): 2'-deoxy-2'Fluoro
  misc_feature (13)..(13): 2'-deoxy-2'Fluoro
  misc_feature (17)..(19): 2'-deoxy-2'Fluoro
  misc_feature (1). .(19): ribonucleotide unmodified or modified as described for this sequence
cugagcauccugcagaccctt

SEQ ID NO: 561 - DNA, 21 bp, Artificial Sequence
  Description of Artificial Sequence: Target Sequence/siNA antisense region (stab05)
  misc_feature (4)..(6): 2'-deoxy-2'Fluoro
  misc_feature (8)..(8): 2'-deoxy-2'Fluoro
  misc_feature (13)..(13): 2'-deoxy-2'Fluoro
  misc_feature (15)..(17): 2'-deoxy-2'Fluoro
  misc_feature (20)..(20): Phosphorothioate or Phosphorodithioate 3'-Internucleotide Linkage (optionally present)
  misc_feature (1). .(19): ribonucleotide unmodified or modified as described for this sequence
gggucugcaggaugcucagtt

SEQ ID NO: 562 - DNA, 21 bp, Artificial Sequence
  Description of Artificial Sequence: Target Sequence/siNA sense region (stab07)
  misc_feature (1)..(1): 5'-3 attached terminal deoxyabasic moiety, inverted abasic, inverted nucleotide or other terminal cap that is optionally present
  misc_feature (21)..(21): 3'-3 attached terminal deoxyabasic moiety, inverted abasic, inverted nucleotide or other terminal cap that is optionally present
  misc_feature (1)..(2): 2'-deoxy-2'Fluoro
  misc_feature (6)..(6): 2'-deoxy-2'Fluoro
  misc_feature (8)..(11): 2'-deoxy-2'Fluoro
  misc_feature (13)..(13): 2'-deoxy-2'Fluoro
  misc_feature (17)..(19): 2'-deoxy-2'Fluoro
  misc_feature (1)..(19): ribonucleotide unmodified or modified as described for this sequence
cugagcauccugcagaccctt

SEQ ID NO: 563 - DNA, 21 bp, Artificial Sequence
  Description of Artificial Sequence: Target Sequence/siNA antisense region (stab08)
  misc_feature (1)..(3): 2'-O-methyl
  misc_feature (4)..(6): 2'-deoxy-2'Fluoro
  misc_feature (7)..(7): 2'-O-methyl
  misc_feature (8)..(8): 2'-deoxy-2'Fluoro
  misc_feature (9)..(12): 2'-O-methyl
  misc_feature (13)..(13): 2'-deoxy-2'Fluoro
  misc_feature (14)..(14): 2'-O-methyl
  misc_feature (15)..(17): 2'-deoxy-2'Fluoro
  misc_feature (18)..(19): 2'-O-methyl
  misc_feature (20)..(20): Phosphorothioate or Phosphorodithioate 3'-Internucleotide Linkage (optionally present)
  misc_feature (1)..(19): ribonucleotide unmodified or modified as described for this sequence
gggucugcaggaugcucagtt

SEQ ID NO: 564 - DNA, 21 bp, Artificial Sequence
  Description of Artificial Sequence: Target Sequence/siNA sense region (stab09)
  misc_feature (1)..(1): 5'-3 attached terminal deoxyabasic moiety, inverted abasic, inverted nucleotide or other terminal cap that is optionally present
  misc_feature (21)..(21): 3'-3 attached terminal deoxyabasic moiety, inverted abasic, inverted nucleotide or other terminal cap that is optionally present
  misc_feature (1)..(19): ribonucleotide unmodified or modified as described for this sequence
cugagcauccugcagaccctt

SEQ ID NO: 565 - DNA, 21 bp, Artificial Sequence
  Description of Artificial Sequence: Target Sequence/siNA antisense region (stab10)
  misc_feature (20)..(20): Phosphorothioate or Phosphorodithioate 3'-Internucleotide Linkage (optionally present)
  misc_feature (1)..(19): ribonucleotide unmodified or modified as described for this sequence
gggucugcaggaugcucagtt

SEQ ID NO: 566 - DNA, 21 bp, Artificial Sequence
  Description of Artificial Sequence: Target Sequence/siNA antisense region (stab19)
  misc_feature (21)..(21): 3'-3 attached terminal deoxyabasic moiety, inverted abasic, inverted nucleotide or other terminal cap that is optionally present
  misc_feature (1)..(3): 2'-O-methyl
  misc_feature (4)..(6): 2'-deoxy-2'Fluoro
  misc_feature (7)..(7): 2'-O-methyl
  misc_feature (8)..(8): 2'-deoxy-2'Fluoro
  misc_feature (9)..(12): 2'-O-methyl
  misc_feature (13)..(13): 2'-deoxy-2'Fluoro
  misc_feature (14)..(14): 2'-O-methyl
  misc_feature (15)..(17): 2'-deoxy-2'Fluoro
  misc_feature (18)..(19): 2'-O-methyl
  misc_feature (1)..(19): ribonucleotide unmodified or modified as described for this sequence
gggucugcaggaugcucagtt

SEQ ID NO: 567 - DNA, 21 bp, Artificial Sequence
  Description of Artificial Sequence: Target Sequence/siNA antisense region (stab22)
  misc_feature (21)..(21): 3'-3 attached terminal deoxyabasic moiety, inverted abasic, inverted nucleotide or other terminal cap that is optionally present
  misc_feature (20)..(20): Phosphorothioate or Phosphorodithioate 3'-Internucleotide Linkage (optionally present)
  misc_feature (1)..(19): ribonucleotide unmodified or modified as described for this sequence
gggucugcaggaugcucagtt

SEQ ID NO: 568 - DNA, 21 bp, Artificial Sequence
  Description of Artificial Sequence: Target Sequence/siNA antisense region (stab25)
  misc_feature (4)..(6): 2'-deoxy-2'Fluoro
  misc_feature (7)..(7): 2'-O-methyl
  misc_feature (8)..(8): 2'-deoxy-2'Fluoro
  misc_feature (9)..(12): 2'-O-methyl
  misc_feature (13)..(13): 2'-deoxy-2'Fluoro
  misc_feature (14)..(14): 2'-O-methyl
  misc_feature (15)..(17): 2'-deoxy-2'Fluoro
  misc_feature (18)..(19): 2'-O-methyl
  misc_feature (20)..(20): Phosphorothioate or Phosphorodithioate 3'-Internucleotide Linkage (optionally present)
  misc_feature (1). .(19): ribonucleotide unmodified or modified as described for this sequence
gggucugcaggaugcucagtt

SEQ ID NO: 569 - RNA, 21 nt, Artificial Sequence
  Description of Artificial Sequence: Target Sequence/siNA antisense region (stab35)
  misc_feature (4)..(6): 2'-deoxy-2'Fluoro
  misc_feature (7)..(7): 2'-O-methyl
  misc_feature (8)..(8): 2'-deoxy-2'Fluoro
  misc_feature (9)..(12): 2'-O-methyl
  misc_feature (13)..(13): 2'-deoxy-2'Fluoro
  misc_feature (14)..(14): 2'-O-methyl
  misc_feature (15)..(17): 2'-deoxy-2'Fluoro
  misc_feature (18)..(21): 2'-O-methyl
gggucugcaggaugcucaguu

SEQ ID NO: 570 - RNA, 21 nt, Artificial Sequence
  Description of Artificial Sequence: Target Sequence/siNA antisense region (stab36)
  misc_feature (4)..(6): 2'-deoxy-2'Fluoro
  misc_feature (7)..(7): 2'-O-methyl
  misc_feature (8)..(8): 2'-deoxy-2'Fluoro
  misc_feature (9)..(12): 2'-O-methyl
  misc_feature (13)..(13): 2'-deoxy-2'Fluoro
  misc_feature (14)..(14): 2'-O-methyl
  misc_feature (15)..(17): 2'-deoxy-2'Fluoro
  misc_feature (18)..(21): 2'-O-methyl
gggucugcaggaugcucagug

SEQ ID NO: 571 - RNA, 19 nt, Artificial Sequence
  Description of Artificial Sequence: Target Sequence/siNA sense region
cccaccccacagccccugc

SEQ ID NO: 572 - RNA, 19 nt, Artificial Sequence
  Description of Artificial Sequence: Target Sequence/siNA antisense region
gcaggggcugugggguggg

SEQ ID NO: 573 - DNA, 21 bp, Artificial Sequence
  Description of Artificial Sequence: Target Sequence/siNA sense region (stab00)
  misc_feature (1)..(19): ribonucleotide unmodified or modified as described for this sequence
cccaccccacagccccugctt

SEQ ID NO: 574 - DNA, 21 bp, Artificial Sequence
  Description of Artificial Sequence: Target Sequence/siNA antisense region (stab00as)
  misc_feature (1)..(19): ribonucleotide unmodified or modified as described for this sequence
gcaggggcuguggggugggtt

SEQ ID NO: 575 - DNA, 21 bp, Artificial Sequence
  Description of Artificial Sequence: Target Sequence/siNA sense region (stab04)
  misc_feature (1)..(1): 5'-3 attached terminal deoxyabasic moiety, inverted abasic, inverted nucleotide or other terminal cap that is optionally present
  misc_feature (21)..(21): 3'-3 attached terminal deoxyabasic moiety, inverted abasic, inverted nucleotide or other terminal cap that is optionally present
  misc_feature (1)..(3): 2'-deoxy-2'Fluoro
  misc_feature (5)..(8): 2'-deoxy-2'Fluoro
  misc_feature (10)..(10): 2'-deoxy-2'Fluoro
  misc_feature (13)..(17): 2'-deoxy-2'Fluoro
  misc_feature (19)..(19): 2'-deoxy-2'Fluoro
  misc_feature (1). .(19): ribonucleotide unmodified or modified as described for this sequence
cccaccccacagccccugctt

SEQ ID NO: 576 - DNA, 21 bp, Artificial Sequence
  Description of Artificial Sequence: Target Sequence/siNA antisense region (stab05)
  misc_feature (2)..(2): 2'-deoxy-2'Fluoro
  misc_feature (8)..(9): 2'-deoxy-2'Fluoro
  misc_feature (11)..(11): 2'-deoxy-2'Fluoro
  misc_feature (16)..(16): 2'-deoxy-2'Fluoro
  misc_feature (20)..(20): Phosphorothioate or Phosphorodithioate 3'-Internucleotide Linkage (optionally present)
  misc_feature (1). .(19): ribonucleotide unmodified or modified as described for this sequence
gcaggggcuguggggugggtt

SEQ ID NO: 577 - DNA, 21 bp, Artificial Sequence
  Description of Artificial Sequence: Target Sequence/siNA sense region (stab07)
  misc_feature (1)..(1): 5'-3 attached terminal deoxyabasic moiety, inverted abasic, inverted nucleotide or other terminal cap that is optionally present
  misc_feature (21)..(21): 3'-3 attached terminal deoxyabasic moiety, inverted abasic, inverted nucleotide or other terminal cap that is optionally present
  misc_feature (1)..(3): 2'-deoxy-2'Fluoro
  misc_feature (5)..(8): 2'-deoxy-2'Fluoro
  misc_feature (10)..(10): 2'-deoxy-2'Fluoro
  misc_feature (13)..(17): 2'-deoxy-2'Fluoro
  misc_feature (19)..(19): 2'-deoxy-2'Fluoro
  misc_feature (1)..(19): ribonucleotide unmodified or modified as described for this sequence
cccaccccacagccccugctt

SEQ ID NO: 578 - DNA, 21 bp, Artificial Sequence
  Description of Artificial Sequence: Target Sequence/siNA antisense region (stab08)
  misc_feature (1)..(1): 2'-O-methyl
  misc_feature (2)..(2): 2'-deoxy-2'Fluoro
  misc_feature (3)..(7): 2'-O-methyl
  misc_feature (8)..(9): 2'-deoxy-2'Fluoro
  misc_feature (10)..(10): 2'-O-methyl
  misc_feature (11)..(11): 2'-deoxy-2'Fluoro
  misc_feature (12)..(15): 2'-O-methyl
  misc_feature (16)..(16): 2'-deoxy-2'Fluoro
  misc_feature (17)..(19): 2'-O-methyl
  misc_feature (20)..(20): Phosphorothioate or Phosphorodithioate 3'-Internucleotide Linkage (optionally present)
  misc_feature (1)..(19): ribonucleotide unmodified or modified as described for this sequence
gcaggggcuguggggugggtt

SEQ ID NO: 579 - DNA, 21 bp, Artificial Sequence
  Description of Artificial Sequence: Target Sequence/siNA sense region (stab09)
  misc_feature (1)..(1): 5'-3 attached terminal deoxyabasic moiety, inverted abasic, inverted nucleotide or other terminal cap that is optionally present
  misc_feature (21)..(21): 3'-3 attached terminal deoxyabasic moiety, inverted abasic, inverted nucleotide or other terminal cap that is optionally present
  misc_feature (1)..(19): ribonucleotide unmodified or modified as described for this sequence
cccaccccacagccccugctt

SEQ ID NO: 580 - DNA, 21 bp, Artificial Sequence
  Description of Artificial Sequence: Target Sequence/siNA antisense region (stab10)
  misc_feature (20)..(20): Phosphorothioate or Phosphorodithioate 3'-Internucleotide Linkage (optionally present)
  misc_feature (1)..(19): ribonucleotide unmodified or modified as described for this sequence
gcaggggcuguggggugggtt

SEQ ID NO: 581 - DNA, 21 bp, Artificial Sequence
  Description of Artificial Sequence: Target Sequence/siNA antisense region (stab19)
  misc_feature (21)..(21): 3'-3 attached terminal deoxyabasic moiety, inverted abasic, inverted nucleotide or other terminal cap that is optionally present
  misc_feature (1)..(1): 2'-O-methyl
  misc_feature (2)..(2): 2'-deoxy-2'Fluoro
  misc_feature (3)..(7): 2'-O-methyl
  misc_feature (8)..(9): 2'-deoxy-2'Fluoro
  misc_feature (10)..(10): 2'-O-methyl
  misc_feature (11)..(11): 2'-deoxy-2'Fluoro
  misc_feature (12)..(15): 2'-O-methyl
  misc_feature (16)..(16): 2'-deoxy-2'Fluoro
  misc_feature (17)..(19): 2'-O-methyl
  misc_feature (1)..(19): ribonucleotide unmodified or modified as described for this sequence
gcaggggcuguggggugggtt

SEQ ID NO: 582 - DNA, 21 bp, Artificial Sequence
  Description of Artificial Sequence: Target Sequence/siNA antisense region (stab22)
  misc_feature (21)..(21): 3'-3 attached terminal deoxyabasic moiety, inverted abasic, inverted nucleotide or other terminal cap that is optionally present
  misc_feature (20)..(20): Phosphorothioate or Phosphorodithioate 3'-Internucleotide Linkage (optionally present)
  misc_feature (1)..(19): ribonucleotide unmodified or modified as described for this sequence
gcaggggcuguggggugggtt

SEQ ID NO: 583 - DNA, 21 bp, Artificial Sequence
  Description of Artificial Sequence: Target Sequence/siNA antisense region (stab25)
  misc_feature (4)..(7): 2'-O-methyl
  misc_feature (8)..(9): 2'-deoxy-2'Fluoro
  misc_feature (10)..(10): 2'-O-methyl
  misc_feature (11)..(11): 2'-deoxy-2'Fluoro
  misc_feature (12)..(15): 2'-O-methyl
  misc_feature (16)..(16): 2'-deoxy-2'Fluoro
  misc_feature (17)..(19): 2'-O-methyl
  misc_feature (20)..(20): Phosphorothioate or Phosphorodithioate 3'-Internucleotide Linkage (optionally present)
  misc_feature (1). .(19): ribonucleotide unmodified or modified as described for this sequence
gcaggggcuguggggugggtt

SEQ ID NO: 584 - RNA, 21 nt, Artificial Sequence
  Description of Artificial Sequence: Target Sequence/siNA antisense region (stab35)
  misc_feature (4)..(7): 2'-O-methyl
  misc_feature (8)..(9): 2'-deoxy-2'Fluoro
  misc_feature (10)..(10): 2'-O-methyl
  misc_feature (11)..(11): 2'-deoxy-2'Fluoro
  misc_feature (12)..(15): 2'-O-methyl
  misc_feature (16)..(16): 2'-deoxy-2'Fluoro
  misc_feature (17)..(21): 2'-O-methyl
gcaggggcugugggguggguu

SEQ ID NO: 585 - RNA, 21 nt, Artificial Sequence
  Description of Artificial Sequence: Target Sequence/siNA antisense region (stab36)
  misc_feature (4)..(7): 2'-O-methyl
  misc_feature (8)..(9): 2'-deoxy-2'Fluoro
  misc_feature (10)..(10): 2'-O-methyl
  misc_feature (11)..(11): 2'-deoxy-2'Fluoro
  misc_feature (12)..(15): 2'-O-methyl
  misc_feature (16)..(16): 2'-deoxy-2'Fluoro
  misc_feature (17)..(21): 2'-O-methyl
gcaggggcugugggguggggg

SEQ ID NO: 586 - RNA, 19 nt, Artificial Sequence
  Description of Artificial Sequence: Target Sequence/siNA sense region
ccaggggcccuccugccac

SEQ ID NO: 587 - RNA, 19 nt, Artificial Sequence
  Description of Artificial Sequence: Target Sequence/siNA antisense region
guggcaggagggccccugg

SEQ ID NO: 588 - DNA, 21 bp, Artificial Sequence
  Description of Artificial Sequence: Target Sequence/siNA sense region (stab00)
  misc_feature (1)..(19): ribonucleotide unmodified or modified as described for this sequence
ccaggggcccuccugccactt

SEQ ID NO: 589 - DNA, 21 bp, Artificial Sequence
  Description of Artificial Sequence: Target Sequence/siNA antisense region (stab00as)
  misc_feature (1)..(19): ribonucleotide unmodified or modified as described for this sequence
guggcaggagggccccuggtt

SEQ ID NO: 590 - DNA, 21 bp, Artificial Sequence
  Description of Artificial Sequence: Target Sequence/siNA sense region (stab04)
  misc_feature (1)..(1): 5'-3 attached terminal deoxyabasic moiety, inverted abasic, inverted nucleotide or other terminal cap that is optionally present
  misc_feature (21)..(21): 3'-3 attached terminal deoxyabasic moiety, inverted abasic, inverted nucleotide or other terminal cap that is optionally present
  misc_feature (1)..(2): 2'-deoxy-2'Fluoro
  misc_feature (8)..(14): 2'-deoxy-2'Fluoro
  misc_feature (16)..(17): 2'-deoxy-2'Fluoro
  misc_feature (19)..(19): 2'-deoxy-2'Fluoro
  misc_feature (1). .(19): ribonucleotide unmodified or modified as described for this sequence
ccaggggcccuccugccactt

SEQ ID NO: 591 - DNA, 21 bp, Artificial Sequence
  Description of Artificial Sequence: Target Sequence/siNA antisense region (stab05)
  misc_feature (2)..(2): 2'-deoxy-2'Fluoro
  misc_feature (5)..(5): 2'-deoxy-2'Fluoro
  misc_feature (13)..(17): 2'-deoxy-2'Fluoro
  misc_feature (20)..(20): Phosphorothioate or Phosphorodithioate 3'-Internucleotide Linkage (optionally present)
  misc_feature (1). .(19): ribonucleotide unmodified or modified as described for this sequence
guggcaggagggccccuggtt

SEQ ID NO: 592 - DNA, 21 bp, Artificial Sequence
  Description of Artificial Sequence: Target Sequence/siNA sense region (stab07)
  misc_feature (1)..(1): 5'-3 attached terminal deoxyabasic moiety, inverted abasic, inverted nucleotide or other terminal cap that is optionally present
  misc_feature (21)..(21): 3'-3 attached terminal deoxyabasic moiety, inverted abasic, inverted nucleotide or other terminal cap that is optionally present
  misc_feature (1)..(2): 2'-deoxy-2'Fluoro
  misc_feature (8)..(14): 2'-deoxy-2'Fluoro
  misc_feature (16)..(17): 2'-deoxy-2'Fluoro
  misc_feature (19)..(19): 2'-deoxy-2'Fluoro
  misc_feature (1)..(19): ribonucleotide unmodified or modified as described for this sequence
ccaggggcccuccugccactt

SEQ ID NO: 593 - DNA, 21 bp, Artificial Sequence
  Description of Artificial Sequence: Target Sequence/siNA antisense region (stab08)
  misc_feature (1)..(1): 2'-O-methyl
  misc_feature (2)..(2): 2'-deoxy-2'Fluoro
  misc_feature (3)..(4): 2'-O-methyl
  misc_feature (5)..(5): 2'-deoxy-2'Fluoro
  misc_feature (6)..(12): 2'-O-methyl
  misc_feature (13)..(17): 2'-deoxy-2'Fluoro
  misc_feature (18)..(19): 2'-O-methyl
  misc_feature (20)..(20): Phosphorothioate or Phosphorodithioate 3'-Internucleotide Linkage (optionally present)
  misc_feature (1)..(19): ribonucleotide unmodified or modified as described for this sequence
guggcaggagggccccuggtt

SEQ ID NO: 594 - DNA, 21 bp, Artificial Sequence
  Description of Artificial Sequence: Target Sequence/siNA sense region (stab09)
  misc_feature (1)..(1): 5'-3 attached terminal deoxyabasic moiety, inverted abasic, inverted nucleotide or other terminal cap that is optionally present
  misc_feature (21)..(21): 3'-3 attached terminal deoxyabasic moiety, inverted abasic, inverted nucleotide or other terminal cap that is optionally present
  misc_feature (1)..(19): ribonucleotide unmodified or modified as described for this sequence
ccaggggcccuccugccactt

SEQ ID NO: 595 - DNA, 21 bp, Artificial Sequence
  Description of Artificial Sequence: Target Sequence/siNA antisense region (stab10)
  misc_feature (20)..(20): Phosphorothioate or Phosphorodithioate 3'-Internucleotide Linkage (optionally present)
  misc_feature (1)..(19): ribonucleotide unmodified or modified as described for this sequence
guggcaggagggccccuggtt

SEQ ID NO: 596 - DNA, 21 bp, Artificial Sequence
  Description of Artificial Sequence: Target Sequence/siNA antisense region (stab19)
  misc_feature (21)..(21): 3'-3 attached terminal deoxyabasic moiety, inverted abasic, inverted nucleotide or other terminal cap that is optionally present
  misc_feature (1)..(1): 2'-O-methyl
  misc_feature (2)..(2): 2'-deoxy-2'Fluoro
  misc_feature (3)..(4): 2'-O-methyl
  misc_feature (5)..(5): 2'-deoxy-2'Fluoro
  misc_feature (6)..(12): 2'-O-methyl
  misc_feature (13)..(17): 2'-deoxy-2'Fluoro
  misc_feature (18)..(19): 2'-O-methyl
  misc_feature (1)..(19): ribonucleotide unmodified or modified as described for this sequence
guggcaggagggccccuggtt

SEQ ID NO: 597 - DNA, 21 bp, Artificial Sequence
  Description of Artificial Sequence: Target Sequence/siNA antisense region (stab22)
  misc_feature (21)..(21): 3'-3 attached terminal deoxyabasic moiety, inverted abasic, inverted nucleotide or other terminal cap that is optionally present
  misc_feature (20)..(20): Phosphorothioate or Phosphorodithioate 3'-Internucleotide Linkage (optionally present)
  misc_feature (1)..(19): ribonucleotide unmodified or modified as described for this sequence
guggcaggagggccccuggtt

SEQ ID NO: 598 - DNA, 21 bp, Artificial Sequence
  Description of Artificial Sequence: Target Sequence/siNA antisense region (stab25)
  misc_feature (4)..(4): 2'-O-methyl
  misc_feature (5)..(5): 2'-deoxy-2'Fluoro
  misc_feature (6)..(12): 2'-O-methyl
  misc_feature (13)..(17): 2'-deoxy-2'Fluoro
  misc_feature (18)..(19): 2'-O-methyl
  misc_feature (20)..(20): Phosphorothioate or Phosphorodithioate 3'-Internucleotide Linkage (optionally present)
  misc_feature (1). .(19): ribonucleotide unmodified or modified as described for this sequence
guggcaggagggccccuggtt

SEQ ID NO: 599 - RNA, 21 nt, Artificial Sequence
  Description of Artificial Sequence: Target Sequence/siNA antisense region (stab35)
  misc_feature (4)..(4): 2'-O-methyl
  misc_feature (5)..(5): 2'-deoxy-2'Fluoro
  misc_feature (6)..(12): 2'-O-methyl
  misc_feature (13)..(17): 2'-deoxy-2'Fluoro
  misc_feature (18)..(21): 2'-O-methyl
guggcaggagggccccugguu

SEQ ID NO: 600 - RNA, 21 nt, Artificial Sequence
  Description of Artificial Sequence: Target Sequence/siNA antisense region (stab36)
  misc_feature (4)..(4): 2'-O-methyl
  misc_feature (5)..(5): 2'-deoxy-2'Fluoro
  misc_feature (6)..(12): 2'-O-methyl
  misc_feature (13)..(17): 2'-deoxy-2'Fluoro
  misc_feature (18)..(21): 2'-O-methyl
guggcaggagggccccuggca

SEQ ID NO: 601 - RNA, 19 nt, Artificial Sequence
  Description of Artificial Sequence: Target Sequence/siNA sense region
cagagcuucccagccccag

SEQ ID NO: 602 - RNA, 19 nt, Artificial Sequence
  Description of Artificial Sequence: Target Sequence/siNA antisense region
cuggggcugggaagcucug

SEQ ID NO: 603 - DNA, 21 bp, Artificial Sequence
  Description of Artificial Sequence: Target Sequence/siNA sense region (stab00)
  misc_feature (1)..(19): ribonucleotide unmodified or modified as described for this sequence
cagagcuucccagccccagtt

SEQ ID NO: 604 - DNA, 21 bp, Artificial Sequence
  Description of Artificial Sequence: Target Sequence/siNA antisense region (stab00as)
  misc_feature (1)..(19): ribonucleotide unmodified or modified as described for this sequence
cuggggcugggaagcucugtt

SEQ ID NO: 605 - DNA, 21 bp, Artificial Sequence
  Description of Artificial Sequence: Target Sequence/siNA sense region (stab04)
  misc_feature (1)..(1): 5'-3 attached terminal deoxyabasic moiety, inverted abasic, inverted nucleotide or other terminal cap that is optionally present
  misc_feature (21)..(21): 3'-3 attached terminal deoxyabasic moiety, inverted abasic, inverted nucleotide or other terminal cap that is optionally present
  misc_feature (1)..(1): 2'-deoxy-2'Fluoro
  misc_feature (6)..(11): 2'-deoxy-2'Fluoro
  misc_feature (14)..(17): 2'-deoxy-2'Fluoro
  misc_feature (1). .(19): ribonucleotide unmodified or modified as described for this sequence
cagagcuucccagccccagtt

SEQ ID NO: 606 - DNA, 21 bp, Artificial Sequence
  Description of Artificial Sequence: Target Sequence/siNA antisense region (stab05)
  misc_feature (1)..(2): 2'-deoxy-2'Fluoro
  misc_feature (7)..(8): 2'-deoxy-2'Fluoro
  misc_feature (15)..(18): 2'-deoxy-2'Fluoro
  misc_feature (20)..(20): Phosphorothioate or Phosphorodithioate 3'-Internucleotide Linkage (optionally present)
  misc_feature (1). .(19): ribonucleotide unmodified or modified as described for this sequence
cuggggcugggaagcucugtt

SEQ ID NO: 607 - DNA, 21 bp, Artificial Sequence
  Description of Artificial Sequence: Target Sequence/siNA sense region (stab07)
  misc_feature (1)..(1): 5'-3 attached terminal deoxyabasic moiety, inverted abasic, inverted nucleotide or other terminal cap that is optionally present
  misc_feature (21)..(21): 3'-3 attached terminal deoxyabasic moiety, inverted abasic, inverted nucleotide or other terminal cap that is optionally present
  misc_feature (1)..(1): 2'-deoxy-2'Fluoro
  misc_feature (6)..(11): 2'-deoxy-2'Fluoro
  misc_feature (14)..(17): 2'-deoxy-2'Fluoro
  misc_feature (1)..(19): ribonucleotide unmodified or modified as described for this sequence
cagagcuucccagccccagtt

SEQ ID NO: 608 - DNA, 21 bp, Artificial Sequence
  Description of Artificial Sequence: Target Sequence/siNA antisense region (stab08)
  misc_feature (1)..(2): 2'-deoxy-2'Fluoro
  misc_feature (3)..(6): 2'-O-methyl
  misc_feature (7)..(8): 2'-deoxy-2'Fluoro
  misc_feature (9)..(14): 2'-O-methyl
  misc_feature (15)..(18): 2'-deoxy-2'Fluoro
  misc_feature (19)..(19): 2'-O-methyl
  misc_feature (20)..(20): Phosphorothioate or Phosphorodithioate 3'-Internucleotide Linkage (optionally present)
  misc_feature (1)..(19): ribonucleotide unmodified or modified as described for this sequence
cuggggcugggaagcucugtt

SEQ ID NO: 609 - DNA, 21 bp, Artificial Sequence
  Description of Artificial Sequence: Target Sequence/siNA sense region (stab09)
  misc_feature (1)..(1): 5'-3 attached terminal deoxyabasic moiety, inverted abasic, inverted nucleotide or other terminal cap that is optionally present
  misc_feature (21)..(21): 3'-3 attached terminal deoxyabasic moiety, inverted abasic, inverted nucleotide or other terminal cap that is optionally present
  misc_feature (1)..(19): ribonucleotide unmodified or modified as described for this sequence
cagagcuucccagccccagtt

SEQ ID NO: 610 - DNA, 21 bp, Artificial Sequence
  Description of Artificial Sequence: Target Sequence/siNA antisense region (stab10)
  misc_feature (20)..(20): Phosphorothioate or Phosphorodithioate 3'-Internucleotide Linkage (optionally present)
  misc_feature (1)..(19): ribonucleotide unmodified or modified as described for this sequence
cuggggcugggaagcucugtt

SEQ ID NO: 611 - DNA, 21 bp, Artificial Sequence
  Description of Artificial Sequence: Target Sequence/siNA antisense region (stab19)
  misc_feature (21)..(21): 3'-3 attached terminal deoxyabasic moiety, inverted abasic, inverted nucleotide or other terminal cap that is optionally present
  misc_feature (1)..(2): 2'-deoxy-2'Fluoro
  misc_feature (3)..(6): 2'-O-methyl
  misc_feature (7)..(8): 2'-deoxy-2'Fluoro
  misc_feature (9)..(14): 2'-O-methyl
  misc_feature (15)..(18): 2'-deoxy-2'Fluoro
  misc_feature (19)..(19): 2'-O-methyl
  misc_feature (1)..(19): ribonucleotide unmodified or modified as described for this sequence
cuggggcugggaagcucugtt

SEQ ID NO: 612 - DNA, 21 bp, Artificial Sequence
  Description of Artificial Sequence: Target Sequence/siNA antisense region (stab22)
  misc_feature (21)..(21): 3'-3 attached terminal deoxyabasic moiety, inverted abasic, inverted nucleotide or other terminal cap that is optionally present
  misc_feature (20)..(20): Phosphorothioate or Phosphorodithioate 3'-Internucleotide Linkage (optionally present)
  misc_feature (1)..(19): ribonucleotide unmodified or modified as described for this sequence
cuggggcugggaagcucugtt

SEQ ID NO: 613 - DNA, 21 bp, Artificial Sequence
  Description of Artificial Sequence: Target Sequence/siNA antisense region (stab25)
  misc_feature (4)..(6): 2'-O-methyl
  misc_feature (7)..(8): 2'-deoxy-2'Fluoro
  misc_feature (9)..(14): 2'-O-methyl
  misc_feature (15)..(18): 2'-deoxy-2'Fluoro
  misc_feature (19)..(19): 2'-O-methyl
  misc_feature (20)..(20): Phosphorothioate or Phosphorodithioate 3'-Internucleotide Linkage (optionally present)
  misc_feature (1). .(19): ribonucleotide unmodified or modified as described for this sequence
cuggggcugggaagcucugtt

SEQ ID NO: 614 - RNA, 21 nt, Artificial Sequence
  Description of Artificial Sequence: Target Sequence/siNA antisense region (stab35)
  misc_feature (4)..(6): 2'-O-methyl
  misc_feature (7)..(8): 2'-deoxy-2'Fluoro
  misc_feature (9)..(14): 2'-O-methyl
  misc_feature (15)..(18): 2'-deoxy-2'Fluoro
  misc_feature (19)..(21): 2'-O-methyl
cuggggcugggaagcucuguu

SEQ ID NO: 615 - RNA, 21 nt, Artificial Sequence
  Description of Artificial Sequence: Target Sequence/siNA antisense region (stab36)
  misc_feature (4)..(6): 2'-O-methyl
  misc_feature (7)..(8): 2'-deoxy-2'Fluoro
  misc_feature (9)..(14): 2'-O-methyl
  misc_feature (15)..(18): 2'-deoxy-2'Fluoro
  misc_feature (19)..(21): 2'-O-methyl
cuggggcugggaagcucugug

SEQ ID NO: 616 - RNA, 19 nt, Artificial Sequence
  Description of Artificial Sequence: Target Sequence/siNA sense region
gccccaccgcaguucagcu

SEQ ID NO: 617 - RNA, 19 nt, Artificial Sequence
  Description of Artificial Sequence: Target Sequence/siNA antisense region
agcugaacugcgguggggc

SEQ ID NO: 618 - DNA, 21 bp, Artificial Sequence
  Description of Artificial Sequence: Target Sequence/siNA sense region (stab00)
  misc_feature (1)..(19): ribonucleotide unmodified or modified as described for this sequence
gccccaccgcaguucagcutt

SEQ ID NO: 619 - DNA, 21 bp, Artificial Sequence
  Description of Artificial Sequence: Target Sequence/siNA antisense region (stab00as)
  misc_feature (1)..(19): ribonucleotide unmodified or modified as described for this sequence
agcugaacugcgguggggctt

SEQ ID NO: 620 - DNA, 21 bp, Artificial Sequence
  Description of Artificial Sequence: Target Sequence/siNA sense region (stab04)
  misc_feature (1)..(1): 5'-3 attached terminal deoxyabasic moiety, inverted abasic, inverted nucleotide or other terminal cap that is optionally present
  misc_feature (21)..(21): 3'-3 attached terminal deoxyabasic moiety, inverted abasic, inverted nucleotide or other terminal cap that is optionally present
  misc_feature (2)..(5): 2'-deoxy-2'Fluoro
  misc_feature (7)..(8): 2'-deoxy-2'Fluoro
  misc_feature (10)..(10): 2'-deoxy-2'Fluoro
  misc_feature (13)..(15): 2'-deoxy-2'Fluoro
  misc_feature (18)..(19): 2'-deoxy-2'Fluoro
  misc_feature (1). .(19): ribonucleotide unmodified or modified as described for this sequence
gccccaccgcaguucagcutt

SEQ ID NO: 621 - DNA, 21 bp, Artificial Sequence
  Description of Artificial Sequence: Target Sequence/siNA antisense region (stab05)
  misc_feature (3)..(4): 2'-deoxy-2'Fluoro
  misc_feature (8)..(9): 2'-deoxy-2'Fluoro
  misc_feature (11)..(11): 2'-deoxy-2'Fluoro
  misc_feature (14)..(14): 2'-deoxy-2'Fluoro
  misc_feature (19)..(19): 2'-deoxy-2'Fluoro
  misc_feature (20)..(20): Phosphorothioate or Phosphorodithioate 3'-Internucleotide Linkage (optionally present)
  misc_feature (1). .(19): ribonucleotide unmodified or modified as described for this sequence
agcugaacugcgguggggctt

SEQ ID NO: 622 - DNA, 21 bp, Artificial Sequence
  Description of Artificial Sequence: Target Sequence/siNA sense region (stab07)
  misc_feature (1)..(1): 5'-3 attached terminal deoxyabasic moiety, inverted abasic, inverted nucleotide or other terminal cap that is optionally present
  misc_feature (21)..(21): 3'-3 attached terminal deoxyabasic moiety, inverted abasic, inverted nucleotide or other terminal cap that is optionally present
  misc_feature (2)..(5): 2'-deoxy-2'Fluoro
  misc_feature (7)..(8): 2'-deoxy-2'Fluoro
  misc_feature (10)..(10): 2'-deoxy-2'Fluoro
  misc_feature (13)..(15): 2'-deoxy-2'Fluoro
  misc_feature (18)..(19): 2'-deoxy-2'Fluoro
  misc_feature (1)..(19): ribonucleotide unmodified or modified as described for this sequence
gccccaccgcaguucagcutt

SEQ ID NO: 623 - DNA, 21 bp, Artificial Sequence
  Description of Artificial Sequence: Target Sequence/siNA antisense region (stab08)
  misc_feature (1)..(2): 2'-O-methyl
  misc_feature (3)..(4): 2'-deoxy-2'Fluoro
  misc_feature (5)..(7): 2'-O-methyl
  misc_feature (8)..(9): 2'-deoxy-2'Fluoro
  misc_feature (10)..(10): 2'-O-methyl
  misc_feature (11)..(11): 2'-deoxy-2'Fluoro
  misc_feature (12)..(13): 2'-O-methyl
  misc_feature (14)..(14): 2'-deoxy-2'Fluoro
  misc_feature (15)..(18): 2'-O-methyl
  misc_feature (19)..(19): 2'-deoxy-2'Fluoro
  misc_feature (20)..(20): Phosphorothioate or Phosphorodithioate 3'-Internucleotide Linkage (optionally present)
  misc_feature (1)..(19): ribonucleotide unmodified or modified as described for this sequence
agcugaacugcgguggggctt

SEQ ID NO: 624 - DNA, 21 bp, Artificial Sequence
  Description of Artificial Sequence: Target Sequence/siNA sense region (stab09)
  misc_feature (1)..(1): 5'-3 attached terminal deoxyabasic moiety, inverted abasic, inverted nucleotide or other terminal cap that is optionally present
  misc_feature (21)..(21): 3'-3 attached terminal deoxyabasic moiety, inverted abasic, inverted nucleotide or other terminal cap that is optionally present
  misc_feature (1)..(19): ribonucleotide unmodified or modified as described for this sequence
gccccaccgcaguucagcutt

SEQ ID NO: 625 - DNA, 21 bp, Artificial Sequence
  Description of Artificial Sequence: Target Sequence/siNA antisense region (stab10)
  misc_feature (20)..(20): Phosphorothioate or Phosphorodithioate 3'-Internucleotide Linkage (optionally present)
  misc_feature (1)..(19): ribonucleotide unmodified or modified as described for this sequence
agcugaacugcgguggggctt

SEQ ID NO: 626 - DNA, 21 bp, Artificial Sequence
  Description of Artificial Sequence: Target Sequence/siNA antisense region (stab19)
  misc_feature (21)..(21): 3'-3 attached terminal deoxyabasic moiety, inverted abasic, inverted nucleotide or other terminal cap that is optionally present
  misc_feature (1)..(2): 2'-O-methyl
  misc_feature (3)..(4): 2'-deoxy-2'Fluoro
  misc_feature (5)..(7): 2'-O-methyl
  misc_feature (8)..(9): 2'-deoxy-2'Fluoro
  misc_feature (10)..(10): 2'-O-methyl
  misc_feature (11)..(11): 2'-deoxy-2'Fluoro
  misc_feature (12)..(13): 2'-O-methyl
  misc_feature (14)..(14): 2'-deoxy-2'Fluoro
  misc_feature (15)..(18): 2'-O-methyl
  misc_feature (19)..(19): 2'-deoxy-2'Fluoro
  misc_feature (1)..(19): ribonucleotide unmodified or modified as described for this sequence
agcugaacugcgguggggctt

SEQ ID NO: 627 - DNA, 21 bp, Artificial Sequence
  Description of Artificial Sequence: Target Sequence/siNA antisense region (stab22)
  misc_feature (21)..(21): 3'-3 attached terminal deoxyabasic moiety, inverted abasic, inverted nucleotide or other terminal cap that is optionally present
  misc_feature (20)..(20): Phosphorothioate or Phosphorodithioate 3'-Internucleotide Linkage (optionally present)
  misc_feature (1)..(19): ribonucleotide unmodified or modified as described for this sequence
agcugaacugcgguggggctt

SEQ ID NO: 628 - DNA, 21 bp, Artificial Sequence
  Description of Artificial Sequence: Target Sequence/siNA antisense region (stab25)
  misc_feature (4)..(4): 2'-deoxy-2'Fluoro
  misc_feature (5)..(7): 2'-O-methyl
  misc_feature (8)..(9): 2'-deoxy-2'Fluoro
  misc_feature (10)..(10): 2'-O-methyl
  misc_feature (11)..(11): 2'-deoxy-2'Fluoro
  misc_feature (12)..(13): 2'-O-methyl
  misc_feature (14)..(14): 2'-deoxy-2'Fluoro
  misc_feature (15)..(18): 2'-O-methyl
  misc_feature (19)..(19): 2'-deoxy-2'Fluoro
  misc_feature (20)..(20): Phosphorothioate or Phosphorodithioate 3'-Internucleotide Linkage (optionally present)
  misc_feature (1). .(19): ribonucleotide unmodified or modified as described for this sequence
agcugaacugcgguggggctt

SEQ ID NO: 629 - RNA, 21 nt, Artificial Sequence
  Description of Artificial Sequence: Target Sequence/siNA antisense region (stab35)
  misc_feature (4)..(4): 2'-deoxy-2'Fluoro
  misc_feature (5)..(7): 2'-O-methyl
  misc_feature (8)..(9): 2'-deoxy-2'Fluoro
  misc_feature (10)..(10): 2'-O-methyl
  misc_feature (11)..(11): 2'-deoxy-2'Fluoro
  misc_feature (12)..(13): 2'-O-methyl
  misc_feature (14)..(14): 2'-deoxy-2'Fluoro
  misc_feature (15)..(18): 2'-O-methyl
  misc_feature (19)..(19): 2'-deoxy-2'Fluoro
  misc_feature (20)..(21): 2'-O-methyl
agcugaacugcgguggggcuu

SEQ ID NO: 630 - RNA, 21 nt, Artificial Sequence
  Description of Artificial Sequence: Target Sequence/siNA antisense region (stab36)
  misc_feature (4)..(4): 2'-deoxy-2'Fluoro
  misc_feature (5)..(7): 2'-O-methyl
  misc_feature (8)..(9): 2'-deoxy-2'Fluoro
  misc_feature (10)..(10): 2'-O-methyl
  misc_feature (11)..(11): 2'-deoxy-2'Fluoro
  misc_feature (12)..(13): 2'-O-methyl
  misc_feature (14)..(14): 2'-deoxy-2'Fluoro
  misc_feature (15)..(18): 2'-O-methyl
  misc_feature (19)..(19): 2'-deoxy-2'Fluoro
  misc_feature (20)..(21): 2'-O-methyl
agcugaacugcgguggggcug

SEQ ID NO: 631 - RNA, 19 nt, Artificial Sequence
  Description of Artificial Sequence: Target Sequence/siNA sense region
uccaccccuguguuaggcu

SEQ ID NO: 632 - RNA, 19 nt, Artificial Sequence
  Description of Artificial Sequence: Target Sequence/siNA antisense region
agccuaacacaggggugga

SEQ ID NO: 633 - DNA, 21 bp, Artificial Sequence
  Description of Artificial Sequence: Target Sequence/siNA sense region (stab00)
  misc_feature (1)..(19): ribonucleotide unmodified or modified as described for this sequence
uccaccccuguguuaggcutt

SEQ ID NO: 634 - DNA, 21 bp, Artificial Sequence
  Description of Artificial Sequence: Target Sequence/siNA antisense region (stab00as)
  misc_feature (1)..(19): ribonucleotide unmodified or modified as described for this sequence
agccuaacacagggguggatt

SEQ ID NO: 635 - DNA, 21 bp, Artificial Sequence
  Description of Artificial Sequence: Target Sequence/siNA sense region (stab04)
  misc_feature (1)..(1): 5'-3 attached terminal deoxyabasic moiety, inverted abasic, inverted nucleotide or other terminal cap that is optionally present
  misc_feature (21)..(21): 3'-3 attached terminal deoxyabasic moiety, inverted abasic, inverted nucleotide or other terminal cap that is optionally present
  misc_feature (1)..(3): 2'-deoxy-2'Fluoro
  misc_feature (5)..(9): 2'-deoxy-2'Fluoro
  misc_feature (11)..(11): 2'-deoxy-2'Fluoro
  misc_feature (13)..(14): 2'-deoxy-2'Fluoro
  misc_feature (18)..(19): 2'-deoxy-2'Fluoro
  misc_feature (1). .(19): ribonucleotide unmodified or modified as described for this sequence
uccaccccuguguuaggcutt

SEQ ID NO: 636 - DNA, 21 bp, Artificial Sequence
  Description of Artificial Sequence: Target Sequence/siNA antisense region (stab05)
  misc_feature (3)..(5): 2'-deoxy-2'Fluoro
  misc_feature (8)..(8): 2'-deoxy-2'Fluoro
  misc_feature (10)..(10): 2'-deoxy-2'Fluoro
  misc_feature (16)..(16): 2'-deoxy-2'Fluoro
  misc_feature (20)..(20): Phosphorothioate or Phosphorodithioate 3'-Internucleotide Linkage (optionally present)
  misc_feature (1). .(19): ribonucleotide unmodified or modified as described for this sequence
agccuaacacagggguggatt

SEQ ID NO: 637 - DNA, 21 bp, Artificial Sequence
  Description of Artificial Sequence: Target Sequence/siNA sense region (stab07)
  misc_feature (1)..(1): 5'-3 attached terminal deoxyabasic moiety, inverted abasic, inverted nucleotide or other terminal cap that is optionally present
  misc_feature (21)..(21): 3'-3 attached terminal deoxyabasic moiety, inverted abasic, inverted nucleotide or other terminal cap that is optionally present
  misc_feature (1)..(3): 2'-deoxy-2'Fluoro
  misc_feature (5)..(9): 2'-deoxy-2'Fluoro
  misc_feature (11)..(11): 2'-deoxy-2'Fluoro
  misc_feature (13)..(14): 2'-deoxy-2'Fluoro
  misc_feature (18)..(19): 2'-deoxy-2'Fluoro
  misc_feature (1)..(19): ribonucleotide unmodified or modified as described for this sequence
uccaccccuguguuaggcutt

SEQ ID NO: 638 - DNA, 21 bp, Artificial Sequence
  Description of Artificial Sequence: Target Sequence/siNA antisense region (stab08)
  misc_feature (1)..(2): 2'-O-methyl
  misc_feature (3)..(5): 2'-deoxy-2'Fluoro
  misc_feature (6)..(7): 2'-O-methyl
  misc_feature (8)..(8): 2'-deoxy-2'Fluoro
  misc_feature (9)..(9): 2'-O-methyl
  misc_feature (10)..(10): 2'-deoxy-2'Fluoro
  misc_feature (11)..(15): 2'-O-methyl
  misc_feature (16)..(16): 2'-deoxy-2'Fluoro
  misc_feature (17)..(19): 2'-O-methyl
  misc_feature (20)..(20): Phosphorothioate or Phosphorodithioate 3'-Internucleotide Linkage (optionally present)
  misc_feature (1)..(19): ribonucleotide unmodified or modified as described for this sequence
agccuaacacagggguggatt

SEQ ID NO: 639 - DNA, 21 bp, Artificial Sequence
  Description of Artificial Sequence: Target Sequence/siNA sense region (stab09)
  misc_feature (1)..(1): 5'-3 attached terminal deoxyabasic moiety, inverted abasic, inverted nucleotide or other terminal cap that is optionally present
  misc_feature (21)..(21): 3'-3 attached terminal deoxyabasic moiety, inverted abasic, inverted nucleotide or other terminal cap that is optionally present
  misc_feature (1)..(19): ribonucleotide unmodified or modified as described for this sequence
uccaccccuguguuaggcutt

SEQ ID NO: 640 - DNA, 21 bp, Artificial Sequence
  Description of Artificial Sequence: Target Sequence/siNA antisense region (stab10)
  misc_feature (20)..(20): Phosphorothioate or Phosphorodithioate 3'-Internucleotide Linkage (optionally present)
  misc_feature (1)..(19): ribonucleotide unmodified or modified as described for this sequence
agccuaacacagggguggatt

SEQ ID NO: 641 - DNA, 21 bp, Artificial Sequence
  Description of Artificial Sequence: Target Sequence/siNA antisense region (stab19)
  misc_feature (21)..(21): 3'-3 attached terminal deoxyabasic moiety, inverted abasic, inverted nucleotide or other terminal cap that is optionally present
  misc_feature (1)..(2): 2'-O-methyl
  misc_feature (3)..(5): 2'-deoxy-2'Fluoro
  misc_feature (6)..(7): 2'-O-methyl
  misc_feature (8)..(8): 2'-deoxy-2'Fluoro
  misc_feature (9)..(9): 2'-O-methyl
  misc_feature (10)..(10): 2'-deoxy-2'Fluoro
  misc_feature (11)..(15): 2'-O-methyl
  misc_feature (16)..(16): 2'-deoxy-2'Fluoro
  misc_feature (17)..(19): 2'-O-methyl
  misc_feature (1)..(19): ribonucleotide unmodified or modified as described for this sequence
agccuaacacagggguggatt

SEQ ID NO: 642 - DNA, 21 bp, Artificial Sequence
  Description of Artificial Sequence: Target Sequence/siNA antisense region (stab22)
  misc_feature (21)..(21): 3'-3 attached terminal deoxyabasic moiety, inverted abasic, inverted nucleotide or other terminal cap that is optionally present
  misc_feature (20)..(20): Phosphorothioate or Phosphorodithioate 3'-Internucleotide Linkage (optionally present)
  misc_feature (1)..(19): ribonucleotide unmodified or modified as described for this sequence
agccuaacacagggguggatt

SEQ ID NO: 643 - DNA, 21 bp, Artificial Sequence
  Description of Artificial Sequence: Target Sequence/siNA antisense region (stab25)
  misc_feature (4)..(5): 2'-deoxy-2'Fluoro
  misc_feature (6)..(7): 2'-O-methyl
  misc_feature (8)..(8): 2'-deoxy-2'Fluoro
  misc_feature (9)..(9): 2'-O-methyl
  misc_feature (10)..(10): 2'-deoxy-2'Fluoro
  misc_feature (11)..(15): 2'-O-methyl
  misc_feature (16)..(16): 2'-deoxy-2'Fluoro
  misc_feature (17)..(19): 2'-O-methyl
  misc_feature (20)..(20): Phosphorothioate or Phosphorodithioate 3'-Internucleotide Linkage (optionally present)
  misc_feature (1). .(19): ribonucleotide unmodified or modified as described for this sequence
agccuaacacagggguggatt

SEQ ID NO: 644 - RNA, 21 nt, Artificial Sequence
  Description of Artificial Sequence: Target Sequence/siNA antisense region (stab35)
  misc_feature (4)..(5): 2'-deoxy-2'Fluoro
  misc_feature (6)..(7): 2'-O-methyl
  misc_feature (8)..(8): 2'-deoxy-2'Fluoro
  misc_feature (9)..(9): 2'-O-methyl
  misc_feature (10)..(10): 2'-deoxy-2'Fluoro
  misc_feature (11)..(15): 2'-O-methyl
  misc_feature (16)..(16): 2'-deoxy-2'Fluoro
  misc_feature (17)..(21): 2'-O-methyl
agccuaacacagggguggauu

SEQ ID NO: 645 - RNA, 21 nt, Artificial Sequence
  Description of Artificial Sequence: Target Sequence/siNA antisense region (stab36)
  misc_feature (4)..(5): 2'-deoxy-2'Fluoro
  misc_feature (6)..(7): 2'-O-methyl
  misc_feature (8)..(8): 2'-deoxy-2'Fluoro
  misc_feature (9)..(9): 2'-O-methyl
  misc_feature (10)..(10): 2'-deoxy-2'Fluoro
  misc_feature (11)..(15): 2'-O-methyl
  misc_feature (16)..(16): 2'-deoxy-2'Fluoro
  misc_feature (17)..(21): 2'-O-methyl
agccuaacacagggguggagc

SEQ ID NO: 646 - RNA, 19 nt, Artificial Sequence
  Description of Artificial Sequence: Target Sequence/siNA sense region
uaccccagcccuccgggag

SEQ ID NO: 647 - RNA, 19 nt, Artificial Sequence
  Description of Artificial Sequence: Target Sequence/siNA antisense region
cucccggagggcuggggua

SEQ ID NO: 648 - DNA, 21 bp, Artificial Sequence
  Description of Artificial Sequence: Target Sequence/siNA sense region (stab00)
  misc_feature (1)..(19): ribonucleotide unmodified or modified as described for this sequence
uaccccagcccuccgggagtt

SEQ ID NO: 649 - DNA, 21 bp, Artificial Sequence
  Description of Artificial Sequence: Target Sequence/siNA antisense region (stab00as)
  misc_feature (1)..(19): ribonucleotide unmodified or modified as described for this sequence
cucccggagggcugggguatt

SEQ ID NO: 650 - DNA, 21 bp, Artificial Sequence
  Description of Artificial Sequence: Target Sequence/siNA sense region (stab04)
  misc_feature (1)..(1): 5'-3 attached terminal deoxyabasic moiety, inverted abasic, inverted nucleotide or other terminal cap that is optionally present
  misc_feature (21)..(21): 3'-3 attached terminal deoxyabasic moiety, inverted abasic, inverted nucleotide or other terminal cap that is optionally present
  misc_feature (1)..(1): 2'-deoxy-2'Fluoro
  misc_feature (3)..(6): 2'-deoxy-2'Fluoro
  misc_feature (9)..(14): 2'-deoxy-2'Fluoro
  misc_feature (1). .(19): ribonucleotide unmodified or modified as described for this sequence
uaccccagcccuccgggagtt

SEQ ID NO: 651 - DNA, 21 bp, Artificial Sequence
  Description of Artificial Sequence: Target Sequence/siNA antisense region (stab05)
  misc_feature (1)..(5): 2'-deoxy-2'Fluoro
  misc_feature (12)..(13): 2'-deoxy-2'Fluoro
  misc_feature (18)..(18): 2'-deoxy-2'Fluoro
  misc_feature (20)..(20): Phosphorothioate or Phosphorodithioate 3'-Internucleotide Linkage (optionally present)
  misc_feature (1). .(19): ribonucleotide unmodified or modified as described for this sequence
cucccggagggcugggguatt

SEQ ID NO: 652 - DNA, 21 bp, Artificial Sequence
  Description of Artificial Sequence: Target Sequence/siNA sense region (stab07)
  misc_feature (1)..(1): 5'-3 attached terminal deoxyabasic moiety, inverted abasic, inverted nucleotide or other terminal cap that is optionally present
  misc_feature (21)..(21): 3'-3 attached terminal deoxyabasic moiety, inverted abasic, inverted nucleotide or other terminal cap that is optionally present
  misc_feature (1)..(1): 2'-deoxy-2'Fluoro
  misc_feature (3)..(6): 2'-deoxy-2'Fluoro
  misc_feature (9)..(14): 2'-deoxy-2'Fluoro
  misc_feature (1)..(19): ribonucleotide unmodified or modified as described for this sequence
uaccccagcccuccgggagtt

SEQ ID NO: 653 - DNA, 21 bp, Artificial Sequence
  Description of Artificial Sequence: Target Sequence/siNA antisense region (stab08)
  misc_feature (1)..(5): 2'-deoxy-2'Fluoro
  misc_feature (6)..(11): 2'-O-methyl
  misc_feature (12)..(13): 2'-deoxy-2'Fluoro
  misc_feature (14)..(17): 2'-O-methyl
  misc_feature (18)..(18): 2'-deoxy-2'Fluoro
  misc_feature (19)..(19): 2'-O-methyl
  misc_feature (20)..(20): Phosphorothioate or Phosphorodithioate 3'-Internucleotide Linkage (optionally present)
  misc_feature (1)..(19): ribonucleotide unmodified or modified as described for this sequence
cucccggagggcugggguatt

SEQ ID NO: 654 - DNA, 21 bp, Artificial Sequence
  Description of Artificial Sequence: Target Sequence/siNA sense region (stab09)
  misc_feature (1)..(1): 5'-3 attached terminal deoxyabasic moiety, inverted abasic, inverted nucleotide or other terminal cap that is optionally present
  misc_feature (21)..(21): 3'-3 attached terminal deoxyabasic moiety, inverted abasic, inverted nucleotide or other terminal cap that is optionally present
  misc_feature (1)..(19): ribonucleotide unmodified or modified as described for this sequence
uaccccagcccuccgggagtt

SEQ ID NO: 655 - DNA, 21 bp, Artificial Sequence
  Description of Artificial Sequence: Target Sequence/siNA antisense region (stab10)
  misc_feature (20)..(20): Phosphorothioate or Phosphorodithioate 3'-Internucleotide Linkage (optionally present)
  misc_feature (1)..(19): ribonucleotide unmodified or modified as described for this sequence
cucccggagggcugggguatt

SEQ ID NO: 656 - DNA, 21 bp, Artificial Sequence
  Description of Artificial Sequence: Target Sequence/siNA antisense region (stab19)
  misc_feature (21)..(21): 3'-3 attached terminal deoxyabasic moiety, inverted abasic, inverted nucleotide or other terminal cap that is optionally present
  misc_feature (1)..(5): 2'-deoxy-2'Fluoro
  misc_feature (6)..(11): 2'-O-methyl
  misc_feature (12)..(13): 2'-deoxy-2'Fluoro
  misc_feature (14)..(17): 2'-O-methyl
  misc_feature (18)..(18): 2'-deoxy-2'Fluoro
  misc_feature (19)..(19): 2'-O-methyl
  misc_feature (1)..(19): ribonucleotide unmodified or modified as described for this sequence
cucccggagggcugggguatt

SEQ ID NO: 657 - DNA, 21 bp, Artificial Sequence
  Description of Artificial Sequence: Target Sequence/siNA antisense region (stab22)
  misc_feature (21)..(21): 3'-3 attached terminal deoxyabasic moiety, inverted abasic, inverted nucleotide or other terminal cap that is optionally present
  misc_feature (20)..(20): Phosphorothioate or Phosphorodithioate 3'-Internucleotide Linkage (optionally present)
  misc_feature (1)..(19): ribonucleotide unmodified or modified as described for this sequence
cucccggagggcugggguatt

SEQ ID NO: 658 - DNA, 21 bp, Artificial Sequence
  Description of Artificial Sequence: Target Sequence/siNA antisense region (stab25)
  misc_feature (4)..(5): 2'-deoxy-2'Fluoro
  misc_feature (6)..(11): 2'-O-methyl
  misc_feature (12)..(13): 2'-deoxy-2'Fluoro
  misc_feature (14)..(17): 2'-O-methyl
  misc_feature (18)..(18): 2'-deoxy-2'Fluoro
  misc_feature (19)..(19): 2'-O-methyl
  misc_feature (20)..(20): Phosphorothioate or Phosphorodithioate 3'-Internucleotide Linkage (optionally present)
  misc_feature (1). .(19): ribonucleotide unmodified or modified as described for this sequence
cucccggagggcugggguatt

SEQ ID NO: 659 - RNA, 21 nt, Artificial Sequence
  Description of Artificial Sequence: Target Sequence/siNA antisense region (stab35)
  misc_feature (4)..(5): 2'-deoxy-2'Fluoro
  misc_feature (6)..(11): 2'-O-methyl
  misc_feature (12)..(13): 2'-deoxy-2'Fluoro
  misc_feature (14)..(17): 2'-O-methyl
  misc_feature (18)..(18): 2'-deoxy-2'Fluoro
  misc_feature (19)..(21): 2'-O-methyl
cucccggagggcugggguauu

SEQ ID NO: 660 - RNA, 21 nt, Artificial Sequence
  Description of Artificial Sequence: Target Sequence/siNA antisense region (stab36)
  misc_feature (4)..(5): 2'-deoxy-2'Fluoro
  misc_feature (6)..(11): 2'-O-methyl
  misc_feature (12)..(13): 2'-deoxy-2'Fluoro
  misc_feature (14)..(17): 2'-O-methyl
  misc_feature (18)..(18): 2'-deoxy-2'Fluoro
  misc_feature (19)..(21): 2'-O-methyl
cucccggagggcugggguagc

SEQ ID NO: 661 - RNA, 19 nt, Artificial Sequence
  Description of Artificial Sequence: Target Sequence/siNA sense region
ggcuucucuacaggaagcc

SEQ ID NO: 662 - RNA, 19 nt, Artificial Sequence
  Description of Artificial Sequence: Target Sequence/siNA antisense region
ggcuuccuguagagaagcc

SEQ ID NO: 663 - DNA, 21 bp, Artificial Sequence
  Description of Artificial Sequence: Target Sequence/siNA sense region (stab00)
  misc_feature (1)..(19): ribonucleotide unmodified or modified as described for this sequence
ggcuucucuacaggaagcctt

SEQ ID NO: 664 - DNA, 21 bp, Artificial Sequence
  Description of Artificial Sequence: Target Sequence/siNA antisense region (stab00as)
  misc_feature (1)..(19): ribonucleotide unmodified or modified as described for this sequence
ggcuuccuguagagaagcctt

SEQ ID NO: 665 - DNA, 21 bp, Artificial Sequence
  Description of Artificial Sequence: Target Sequence/siNA sense region (stab04)
  misc_feature (1)..(1): 5'-3 attached terminal deoxyabasic moiety, inverted abasic, inverted nucleotide or other terminal cap that is optionally present
  misc_feature (21)..(21): 3'-3 attached terminal deoxyabasic moiety, inverted abasic, inverted nucleotide or other terminal cap that is optionally present
  misc_feature (3)..(9): 2'-deoxy-2'Fluoro
  misc_feature (11)..(11): 2'-deoxy-2'Fluoro
  misc_feature (18)..(19): 2'-deoxy-2'Fluoro
  misc_feature (1). .(19): ribonucleotide unmodified or modified as described for this sequence
ggcuucucuacaggaagcctt

SEQ ID NO: 666 - DNA, 21 bp, Artificial Sequence
  Description of Artificial Sequence: Target Sequence/siNA antisense region (stab05)
  misc_feature (3)..(8): 2'-deoxy-2'Fluoro
  misc_feature (10)..(10): 2'-deoxy-2'Fluoro
  misc_feature (18)..(19): 2'-deoxy-2'Fluoro
  misc_feature (20)..(20): Phosphorothioate or Phosphorodithioate 3'-Internucleotide Linkage (optionally present)
  misc_feature (1). .(19): ribonucleotide unmodified or modified as described for this sequence
ggcuuccuguagagaagcctt

SEQ ID NO: 667 - DNA, 21 bp, Artificial Sequence
  Description of Artificial Sequence: Target Sequence/siNA sense region (stab07)
  misc_feature (1)..(1): 5'-3 attached terminal deoxyabasic moiety, inverted abasic, inverted nucleotide or other terminal cap that is optionally present
  misc_feature (21)..(21): 3'-3 attached terminal deoxyabasic moiety, inverted abasic, inverted nucleotide or other terminal cap that is optionally present
  misc_feature (3)..(9): 2'-deoxy-2'Fluoro
  misc_feature (11)..(11): 2'-deoxy-2'Fluoro
  misc_feature (18)..(19): 2'-deoxy-2'Fluoro
ggcuucucuacaggaagcctt

SEQ ID NO: 668 - DNA, 21 bp, Artificial Sequence
  Description of Artificial Sequence: Target Sequence/siNA antisense region (stab08)
  misc_feature (1)..(2): 2'-O-methyl
  misc_feature (3)..(8): 2'-deoxy-2'Fluoro
  misc_feature (9)..(9): 2'-O-methyl
  misc_feature (10)..(10): 2'-deoxy-2'Fluoro
  misc_feature (11)..(17): 2'-O-methyl
  misc_feature (18)..(19): 2'-deoxy-2'Fluoro
  misc_feature (20)..(20): Phosphorothioate or Phosphorodithioate 3'-Internucleotide Linkage (optionally present)
  misc_feature (1)..(19): ribonucleotide unmodified or modified as described for this sequence
ggcuuccuguagagaagcctt

SEQ ID NO: 669 - DNA, 21 bp, Artificial Sequence
  Description of Artificial Sequence: Target Sequence/siNA sense region (stab09)
  misc_feature (1)..(1): 5'-3 attached terminal deoxyabasic moiety, inverted abasic, inverted nucleotide or other terminal cap that is optionally present
  misc_feature (21)..(21): 3'-3 attached terminal deoxyabasic moiety, inverted abasic, inverted nucleotide or other terminal cap that is optionally present
  misc_feature (1)..(19): ribonucleotide unmodified or modified as described for this sequence
ggcuucucuacaggaagcctt

SEQ ID NO: 670 - DNA, 21 bp, Artificial Sequence
  Description of Artificial Sequence: Target Sequence/siNA antisense region (stab10)
  misc_feature (20)..(20): Phosphorothioate or Phosphorodithioate 3'-Internucleotide Linkage (optionally present)
  misc_feature (1)..(19): ribonucleotide unmodified or modified as described for this sequence
ggcuuccuguagagaagcctt

SEQ ID NO: 671 - DNA, 21 bp, Artificial Sequence
  Description of Artificial Sequence: Target Sequence/siNA antisense region (stab19)
  misc_feature (21)..(21): 3'-3 attached terminal deoxyabasic moiety, inverted abasic, inverted nucleotide or other terminal cap that is optionally present
  misc_feature (1)..(2): 2'-O-methyl
  misc_feature (3)..(8): 2'-deoxy-2'Fluoro
  misc_feature (9)..(9): 2'-O-methyl
  misc_feature (10)..(10): 2'-deoxy-2'Fluoro
  misc_feature (11)..(17): 2'-O-methyl
  misc_feature (18)..(19): 2'-deoxy-2'Fluoro
  misc_feature (1)..(19): ribonucleotide unmodified or modified as described for this sequence
ggcuuccuguagagaagcctt

SEQ ID NO: 672 - DNA, 21 bp, Artificial Sequence
  Description of Artificial Sequence: Target Sequence/siNA antisense region (stab22)
  misc_feature (21)..(21): 3'-3 attached terminal deoxyabasic moiety, inverted abasic, inverted nucleotide or other terminal cap that is optionally present
  misc_feature (20)..(20): Phosphorothioate or Phosphorodithioate 3'-Internucleotide Linkage (optionally present)
  misc_feature (1)..(19): ribonucleotide unmodified or modified as described for this sequence
ggcuuccuguagagaagcctt

SEQ ID NO: 673 - DNA, 21 bp, Artificial Sequence
  Description of Artificial Sequence: Target Sequence/siNA antisense region (stab25)
  misc_feature (4)..(8): 2'-deoxy-2'Fluoro
  misc_feature (9)..(9): 2'-O-methyl
  misc_feature (10)..(10): 2'-deoxy-2'Fluoro
  misc_feature (11)..(17): 2'-O-methyl
  misc_feature (18)..(19): 2'-deoxy-2'Fluoro
  misc_feature (20)..(20): Phosphorothioate or Phosphorodithioate 3'-Internucleotide Linkage (optionally present)
  misc_feature (1). .(19): ribonucleotide unmodified or modified as described for this sequence
ggcuuccuguagagaagcctt

SEQ ID NO: 674 - RNA, 21 nt, Artificial Sequence
  Description of Artificial Sequence: Target Sequence/siNA antisense region (stab35)
  misc_feature (4)..(8): 2'-deoxy-2'Fluoro
  misc_feature (9)..(9): 2'-O-methyl
  misc_feature (10)..(10): 2'-deoxy-2'Fluoro
  misc_feature (11)..(17): 2'-O-methyl
  misc_feature (18)..(19): 2'-deoxy-2'Fluoro
  misc_feature (20)..(21): 2'-O-methyl
ggcuuccuguagagaagccuu

SEQ ID NO: 675 - RNA, 21 nt, Artificial Sequence
  Description of Artificial Sequence: Target Sequence/siNA antisense region (stab36)
  misc_feature (4)..(8): 2'-deoxy-2'Fluoro
  misc_feature (9)..(9): 2'-O-methyl
  misc_feature (10)..(10): 2'-deoxy-2'Fluoro
  misc_feature (11)..(17): 2'-O-methyl
  misc_feature (18)..(19): 2'-deoxy-2'Fluoro
  misc_feature (20)..(21): 2'-O-methyl
ggcuuccuguagagaagccuc

SEQ ID NO: 676 - RNA, 19 nt, Artificial Sequence
  Description of Artificial Sequence: Target Sequence/siNA sense region
ccucccgggaacacccagc

SEQ ID NO: 677 - RNA, 19 nt, Artificial Sequence
  Description of Artificial Sequence: Target Sequence/siNA antisense region
gcuggguguucccgggagg

SEQ ID NO: 678 - DNA, 21 bp, Artificial Sequence
  Description of Artificial Sequence: Target Sequence/siNA sense region (stab00)
  misc_feature (1)..(19): ribonucleotide unmodified or modified as described for this sequence
ccucccgggaacacccagctt

SEQ ID NO: 679 - DNA, 21 bp, Artificial Sequence
  Description of Artificial Sequence: Target Sequence/siNA antisense region (stab00as)
  misc_feature (1)..(19): ribonucleotide unmodified or modified as described for this sequence
gcuggguguucccgggaggtt

SEQ ID NO: 680 - DNA, 21 bp, Artificial Sequence
  Description of Artificial Sequence: Target Sequence/siNA sense region (stab04)
  misc_feature (1)..(1): 5'-3 attached terminal deoxyabasic moiety, inverted abasic, inverted nucleotide or other terminal cap that is optionally present
  misc_feature (21)..(21): 3'-3 attached terminal deoxyabasic moiety, inverted abasic, inverted nucleotide or other terminal cap that is optionally present
  misc_feature (1)..(6): 2'-deoxy-2'Fluoro
  misc_feature (12)..(12): 2'-deoxy-2'Fluoro
  misc_feature (14)..(16): 2'-deoxy-2'Fluoro
  misc_feature (19)..(19): 2'-deoxy-2'Fluoro
  misc_feature (1). .(19): ribonucleotide unmodified or modified as described for this sequence
ccucccgggaacacccagctt

SEQ ID NO: 681 - DNA, 21 bp, Artificial Sequence
  Description of Artificial Sequence: Target Sequence/siNA antisense region (stab05)
  misc_feature (2)..(3): 2'-deoxy-2'Fluoro
  misc_feature (7)..(7): 2'-deoxy-2'Fluoro
  misc_feature (9)..(13): 2'-deoxy-2'Fluoro
  misc_feature (20)..(20): Phosphorothioate or Phosphorodithioate 3'-Internucleotide Linkage (optionally present)
  misc_feature (1). .(19): ribonucleotide unmodified or modified as described for this sequence
gcuggguguucccgggaggtt

SEQ ID NO: 682 - DNA, 21 bp, Artificial Sequence
  Description of Artificial Sequence: Target Sequence/siNA sense region (stab07)
  misc_feature (1)..(1): 5'-3 attached terminal deoxyabasic moiety, inverted abasic, inverted nucleotide or other terminal cap that is optionally present
  misc_feature (21)..(21): 3'-3 attached terminal deoxyabasic moiety, inverted abasic, inverted nucleotide or other terminal cap that is optionally present
  misc_feature (1)..(6): 2'-deoxy-2'Fluoro
  misc_feature (12)..(12): 2'-deoxy-2'Fluoro
  misc_feature (14)..(16): 2'-deoxy-2'Fluoro
  misc_feature (19)..(19): 2'-deoxy-2'Fluoro
  misc_feature (1)..(19): ribonucleotide unmodified or modified as described for this sequence
ccucccgggaacacccagctt

SEQ ID NO: 683 - DNA, 21 bp, Artificial Sequence
  Description of Artificial Sequence: Target Sequence/siNA antisense region (stab08)
  misc_feature (1)..(1): 2'-O-methyl
  misc_feature (2)..(3): 2'-deoxy-2'Fluoro
  misc_feature (4)..(6): 2'-O-methyl
  misc_feature (7)..(7): 2'-deoxy-2'Fluoro
  misc_feature (8)..(8): 2'-O-methyl
  misc_feature (9)..(13): 2'-deoxy-2'Fluoro
  misc_feature (14)..(19): 2'-O-methyl
  misc_feature (20)..(20): Phosphorothioate or Phosphorodithioate 3'-Internucleotide Linkage (optionally present)
  misc_feature (1)..(19): ribonucleotide unmodified or modified as described for this sequence
gcuggguguucccgggaggtt

SEQ ID NO: 684 - DNA, 21 bp, Artificial Sequence
  Description of Artificial Sequence: Target Sequence/siNA sense region (stab09)
  misc_feature (1)..(1): 5'-3 attached terminal deoxyabasic moiety, inverted abasic, inverted nucleotide or other terminal cap that is optionally present
  misc_feature (21)..(21): 3'-3 attached terminal deoxyabasic moiety, inverted abasic, inverted nucleotide or other terminal cap that is optionally present
  misc_feature (1)..(19): ribonucleotide unmodified or modified as described for this sequence
ccucccgggaacacccagctt

SEQ ID NO: 685 - DNA, 21 bp, Artificial Sequence
  Description of Artificial Sequence: Target Sequence/siNA antisense region (stab10)
  misc_feature (20)..(20): Phosphorothioate or Phosphorodithioate 3'-Internucleotide Linkage (optionally present)
  misc_feature (1)..(19): ribonucleotide unmodified or modified as described for this sequence
gcuggguguucccgggaggtt

SEQ ID NO: 686 - DNA, 21 bp, Artificial Sequence
  Description of Artificial Sequence: Target Sequence/siNA antisense region (stab19)
  misc_feature (21)..(21): 3'-3 attached terminal deoxyabasic moiety, inverted abasic, inverted nucleotide or other terminal cap that is optionally present
  misc_feature (1)..(1): 2'-O-methyl
  misc_feature (2)..(3): 2'-deoxy-2'Fluoro
  misc_feature (4)..(6): 2'-O-methyl
  misc_feature (7)..(7): 2'-deoxy-2'Fluoro
  misc_feature (8)..(8): 2'-O-methyl
  misc_feature (9)..(13): 2'-deoxy-2'Fluoro
  misc_feature (14)..(19): 2'-O-methyl
  misc_feature (1)..(19): ribonucleotide unmodified or modified as described for this sequence
gcuggguguucccgggaggtt

SEQ ID NO: 687 - DNA, 21 bp, Artificial Sequence
  Description of Artificial Sequence: Target Sequence/siNA antisense region (stab22)
  misc_feature (21)..(21): 3'-3 attached terminal deoxyabasic moiety, inverted abasic, inverted nucleotide or other terminal cap that is optionally present
  misc_feature (20)..(20): Phosphorothioate or Phosphorodithioate 3'-Internucleotide Linkage (optionally present)
  misc_feature (1)..(19): ribonucleotide unmodified or modified as described for this sequence
gcuggguguucccgggaggtt

SEQ ID NO: 688 - DNA, 21 bp, Artificial Sequence
  Description of Artificial Sequence: Target Sequence/siNA antisense region (stab25)
  misc_feature (4)..(6): 2'-O-methyl
  misc_feature (7)..(7): 2'-deoxy-2'Fluoro
  misc_feature (8)..(8): 2'-O-methyl
  misc_feature (9)..(13): 2'-deoxy-2'Fluoro
  misc_feature (14)..(19): 2'-O-methyl
  misc_feature (20)..(20): Phosphorothioate or Phosphorodithioate 3'-Internucleotide Linkage (optionally present)
  misc_feature (1). .(19): ribonucleotide unmodified or modified as described for this sequence
gcuggguguucccgggaggtt

SEQ ID NO: 689 - RNA, 21 nt, Artificial Sequence
  Description of Artificial Sequence: Target Sequence/siNA antisense region (stab35)
  misc_feature (4)..(6): 2'-O-methyl
  misc_feature (7)..(7): 2'-deoxy-2'Fluoro
  misc_feature (8)..(8): 2'-O-methyl
  misc_feature (9)..(13): 2'-deoxy-2'Fluoro
  misc_feature (14)..(21): 2'-O-methyl
gcuggguguucccgggagguu

SEQ ID NO: 690 - RNA, 21 nt, Artificial Sequence
  Description of Artificial Sequence: Target Sequence/siNA antisense region (stab36)
  misc_feature (4)..(6): 2'-O-methyl
  misc_feature (7)..(7): 2'-deoxy-2'Fluoro
  misc_feature (8)..(8): 2'-O-methyl
  misc_feature (9)..(13): 2'-deoxy-2'Fluoro
  misc_feature (14)..(21): 2'-O-methyl
gcuggguguucccgggagggc

SEQ ID NO: 691 - RNA, 19 nt, Artificial Sequence
  Description of Artificial Sequence: Target Sequence/siNA sense region
cagccgcugccuggccugc

SEQ ID NO: 692 - RNA, 19 nt, Artificial Sequence
  Description of Artificial Sequence: Target Sequence/siNA antisense region
gcaggccaggcagcggcug

SEQ ID NO: 693 - DNA, 21 bp, Artificial Sequence
  Description of Artificial Sequence: Target Sequence/siNA sense region (stab00)
  misc_feature (1)..(19): ribonucleotide unmodified or modified as described for this sequence
cagccgcugccuggccugctt

SEQ ID NO: 694 - DNA, 21 bp, Artificial Sequence
  Description of Artificial Sequence: Target Sequence/siNA antisense region (stab00as)
  misc_feature (1)..(19): ribonucleotide unmodified or modified as described for this sequence
gcaggccaggcagcggcugtt

SEQ ID NO: 695 - DNA, 21 bp, Artificial Sequence
  Description of Artificial Sequence: Target Sequence/siNA sense region (stab04)
  misc_feature (1)..(1): 5'-3 attached terminal deoxyabasic moiety, inverted abasic, inverted nucleotide or other terminal cap that is optionally present
  misc_feature (21)..(21): 3'-3 attached terminal deoxyabasic moiety, inverted abasic, inverted nucleotide or other terminal cap that is optionally present
  misc_feature (1)..(1): 2'-deoxy-2'Fluoro
  misc_feature (4)..(5): 2'-deoxy-2'Fluoro
  misc_feature (7)..(8): 2'-deoxy-2'Fluoro
  misc_feature (10)..(12): 2'-deoxy-2'Fluoro
  misc_feature (15)..(17): 2'-deoxy-2'Fluoro
  misc_feature (19)..(19): 2'-deoxy-2'Fluoro
  misc_feature (1). .(19): ribonucleotide unmodified or modified as described for this sequence
cagccgcugccuggccugctt

SEQ ID NO: 696 - DNA, 21 bp, Artificial Sequence
  Description of Artificial Sequence: Target Sequence/siNA antisense region (stab05)
  misc_feature (2)..(2): 2'-deoxy-2'Fluoro
  misc_feature (6)..(7): 2'-deoxy-2'Fluoro
  misc_feature (11)..(11): 2'-deoxy-2'Fluoro
  misc_feature (14)..(14): 2'-deoxy-2'Fluoro
  misc_feature (17)..(18): 2'-deoxy-2'Fluoro
  misc_feature (20)..(20): Phosphorothioate or Phosphorodithioate 3'-Internucleotide Linkage (optionally present)
  misc_feature (1). .(19): ribonucleotide unmodified or modified as described for this sequence
gcaggccaggcagcggcugtt

SEQ ID NO: 697 - DNA, 21 bp, Artificial Sequence
  Description of Artificial Sequence: Target Sequence/siNA sense region (stab07)
  misc_feature (1)..(1): 5'-3 attached terminal deoxyabasic moiety, inverted abasic, inverted nucleotide or other terminal cap that is optionally present
  misc_feature (21)..(21): 3'-3 attached terminal deoxyabasic moiety, inverted abasic, inverted nucleotide or other terminal cap that is optionally present
  misc_feature (1)..(1): 2'-deoxy-2'Fluoro
  misc_feature (4)..(5): 2'-deoxy-2'Fluoro
  misc_feature (7)..(8): 2'-deoxy-2'Fluoro
  misc_feature (10)..(12): 2'-deoxy-2'Fluoro
  misc_feature (15)..(17): 2'-deoxy-2'Fluoro
  misc_feature (19)..(19): 2'-deoxy-2'Fluoro
  misc_feature (1)..(19): ribonucleotide unmodified or modified as described for this sequence
cagccgcugccuggccugctt

SEQ ID NO: 698 - DNA, 21 bp, Artificial Sequence
  Description of Artificial Sequence: Target Sequence/siNA antisense region (stab08)
  misc_feature (1)..(1): 2'-O-methyl
  misc_feature (2)..(2): 2'-deoxy-2'Fluoro
  misc_feature (3)..(5): 2'-O-methyl
  misc_feature (6)..(7): 2'-deoxy-2'Fluoro
  misc_feature (8)..(10): 2'-O-methyl
  misc_feature (11)..(11): 2'-deoxy-2'Fluoro
  misc_feature (12)..(13): 2'-O-methyl
  misc_feature (14)..(14): 2'-deoxy-2'Fluoro
  misc_feature (15)..(16): 2'-O-methyl
  misc_feature (17)..(18): 2'-deoxy-2'Fluoro
  misc_feature (19)..(19): 2'-O-methyl
  misc_feature (20)..(20): Phosphorothioate or Phosphorodithioate 3'-Internucleotide Linkage (optionally present)
  misc_feature (1)..(19): ribonucleotide unmodified or modified as described for this sequence
gcaggccaggcagcggcugtt

SEQ ID NO: 699 - DNA, 21 bp, Artificial Sequence
  Description of Artificial Sequence: Target Sequence/siNA sense region (stab09)
  misc_feature (1)..(1): 5'-3 attached terminal deoxyabasic moiety, inverted abasic, inverted nucleotide or other terminal cap that is optionally present
  misc_feature (21)..(21): 3'-3 attached terminal deoxyabasic moiety, inverted abasic, inverted nucleotide or other terminal cap that is optionally present
  misc_feature (1)..(19): ribonucleotide unmodified or modified as described for this sequence
cagccgcugccuggccugctt

SEQ ID NO: 700 - DNA, 21 bp, Artificial Sequence
  Description of Artificial Sequence: Target Sequence/siNA antisense region (stab10)
  misc_feature (20)..(20): Phosphorothioate or Phosphorodithioate 3'-Internucleotide Linkage (optionally present)
  misc_feature (1)..(19): ribonucleotide unmodified or modified as described for this sequence
gcaggccaggcagcggcugtt

SEQ ID NO: 701 - DNA, 21 bp, Artificial Sequence
  Description of Artificial Sequence: Target Sequence/siNA antisense region (stab19)
  misc_feature (21)..(21): 3'-3 attached terminal deoxyabasic moiety, inverted abasic, inverted nucleotide or other terminal cap that is optionally present
  misc_feature (1)..(1): 2'-O-methyl
  misc_feature (2)..(2): 2'-deoxy-2'Fluoro
  misc_feature (3)..(5): 2'-O-methyl
  misc_feature (6)..(7): 2'-deoxy-2'Fluoro
  misc_feature (8)..(10): 2'-O-methyl
  misc_feature (11)..(11): 2'-deoxy-2'Fluoro
  misc_feature (12)..(13): 2'-O-methyl
  misc_feature (14)..(14): 2'-deoxy-2'Fluoro
  misc_feature (15)..(16): 2'-O-methyl
  misc_feature (17)..(18): 2'-deoxy-2'Fluoro
  misc_feature (19)..(19): 2'-O-methyl
  misc_feature (1)..(19): ribonucleotide unmodified or modified as described for this sequence
gcaggccaggcagcggcugtt

SEQ ID NO: 702 - DNA, 21 bp, Artificial Sequence
  Description of Artificial Sequence: Target Sequence/siNA antisense region (stab22)
  misc_feature (21)..(21): 3'-3 attached terminal deoxyabasic moiety, inverted abasic, inverted nucleotide or other terminal cap that is optionally present
  misc_feature (20)..(20): Phosphorothioate or Phosphorodithioate 3'-Internucleotide Linkage (optionally present)
  misc_feature (1)..(19): ribonucleotide unmodified or modified as described for this sequence
gcaggccaggcagcggcugtt

SEQ ID NO: 703 - DNA, 21 bp, Artificial Sequence
  Description of Artificial Sequence: Target Sequence/siNA antisense region (stab25)
  misc_feature (4)..(5): 2'-O-methyl
  misc_feature (6)..(7): 2'-deoxy-2'Fluoro
  misc_feature (8)..(10): 2'-O-methyl
  misc_feature (11)..(11): 2'-deoxy-2'Fluoro
  misc_feature (12)..(13): 2'-O-methyl
  misc_feature (14)..(14): 2'-deoxy-2'Fluoro
  misc_feature (15)..(16): 2'-O-methyl
  misc_feature (17)..(18): 2'-deoxy-2'Fluoro
  misc_feature (19)..(19): 2'-O-methyl
  misc_feature (20)..(20): Phosphorothioate or Phosphorodithioate 3'-Internucleotide Linkage (optionally present)
  misc_feature (1). .(19): ribonucleotide unmodified or modified as described for this sequence
gcaggccaggcagcggcugtt

SEQ ID NO: 704 - RNA, 21 nt, Artificial Sequence
  Description of Artificial Sequence: Target Sequence/siNA antisense region (stab35)
  misc_feature (4)..(5): 2'-O-methyl
  misc_feature (6)..(7): 2'-deoxy-2'Fluoro
  misc_feature (8)..(10): 2'-O-methyl
  misc_feature (11)..(11): 2'-deoxy-2'Fluoro
  misc_feature (12)..(13): 2'-O-methyl
  misc_feature (14)..(14): 2'-deoxy-2'Fluoro
  misc_feature (15)..(16): 2'-O-methyl
  misc_feature (17)..(18): 2'-deoxy-2'Fluoro
  misc_feature (19)..(21): 2'-O-methyl
gcaggccaggcagcggcuguu

SEQ ID NO: 705 - RNA, 21 nt, Artificial Sequence
  Description of Artificial Sequence: Target Sequence/siNA antisense region (stab36)
  misc_feature (4)..(5): 2'-O-methyl
  misc_feature (6)..(7): 2'-deoxy-2'Fluoro
  misc_feature (8)..(10): 2'-O-methyl
  misc_feature (11)..(11): 2'-deoxy-2'Fluoro
  misc_feature (12)..(13): 2'-O-methyl
  misc_feature (14)..(14): 2'-deoxy-2'Fluoro
  misc_feature (15)..(16): 2'-O-methyl
  misc_feature (17)..(18): 2'-deoxy-2'Fluoro
  misc_feature (19)..(21): 2'-O-methyl
gcaggccaggcagcggcugcu

SEQ ID NO: 706 - RNA, 19 nt, Artificial Sequence
  Description of Artificial Sequence: Target Sequence/siNA sense region
ccacuggcuuccccgccag

SEQ ID NO: 707 - RNA, 19 nt, Artificial Sequence
  Description of Artificial Sequence: Target Sequence/siNA antisense region
cuggcggggaagccagugg

SEQ ID NO: 708 - DNA, 21 bp, Artificial Sequence
  Description of Artificial Sequence: Target Sequence/siNA sense region (stab00)
  misc_feature (1)..(19): ribonucleotide unmodified or modified as described for this sequence
ccacuggcuuccccgccagtt

SEQ ID NO: 709 - DNA, 21 bp, Artificial Sequence
  Description of Artificial Sequence: Target Sequence/siNA antisense region (stab00as)
  misc_feature (1)..(19): ribonucleotide unmodified or modified as described for this sequence
cuggcggggaagccaguggtt

SEQ ID NO: 710 - DNA, 21 bp, Artificial Sequence
  Description of Artificial Sequence: Target Sequence/siNA sense region (stab04)
  misc_feature (1)..(1): 5'-3 attached terminal deoxyabasic moiety, inverted abasic, inverted nucleotide or other terminal cap that is optionally present
  misc_feature (21)..(21): 3'-3 attached terminal deoxyabasic moiety, inverted abasic, inverted nucleotide or other terminal cap that is optionally present
  misc_feature (1)..(2): 2'-deoxy-2'Fluoro
  misc_feature (4)..(5): 2'-deoxy-2'Fluoro
  misc_feature (8)..(14): 2'-deoxy-2'Fluoro
  misc_feature (16)..(17): 2'-deoxy-2'Fluoro
  misc_feature (1). .(19): ribonucleotide unmodified or modified as described for this sequence
ccacuggcuuccccgccagtt

SEQ ID NO: 711 - DNA, 21 bp, Artificial Sequence
  Description of Artificial Sequence: Target Sequence/siNA antisense region (stab05)
  misc_feature (1)..(2): 2'-deoxy-2'Fluoro
  misc_feature (5)..(5): 2'-deoxy-2'Fluoro
  misc_feature (13)..(14): 2'-deoxy-2'Fluoro
  misc_feature (17)..(17): 2'-deoxy-2'Fluoro
  misc_feature (20)..(20): Phosphorothioate or Phosphorodithioate 3'-Internucleotide Linkage (optionally present)
  misc_feature (1). .(19): ribonucleotide unmodified or modified as described for this sequence
cuggcggggaagccaguggtt

SEQ ID NO: 712 - DNA, 21 bp, Artificial Sequence
  Description of Artificial Sequence: Target Sequence/siNA sense region (stab07)
  misc_feature (1)..(1): 5'-3 attached terminal deoxyabasic moiety, inverted abasic, inverted nucleotide or other terminal cap that is optionally present
  misc_feature (21)..(21): 3'-3 attached terminal deoxyabasic moiety, inverted abasic, inverted nucleotide or other terminal cap that is optionally present
  misc_feature (1)..(2): 2'-deoxy-2'Fluoro
  misc_feature (4)..(5): 2'-deoxy-2'Fluoro
  misc_feature (8)..(14): 2'-deoxy-2'Fluoro
  misc_feature (16)..(17): 2'-deoxy-2'Fluoro
  misc_feature (1)..(19): ribonucleotide unmodified or modified as described for this sequence
ccacuggcuuccccgccagtt

SEQ ID NO: 713 - DNA, 21 bp, Artificial Sequence
  Description of Artificial Sequence: Target Sequence/siNA antisense region (stab08)
  misc_feature (1)..(2): 2'-deoxy-2'Fluoro
  misc_feature (3)..(4): 2'-O-methyl
  misc_feature (5)..(5): 2'-deoxy-2'Fluoro
  misc_feature (6)..(12): 2'-O-methyl
  misc_feature (13)..(14): 2'-deoxy-2'Fluoro
  misc_feature (15)..(16): 2'-O-methyl
  misc_feature (17)..(17): 2'-deoxy-2'Fluoro
  misc_feature (18)..(19): 2'-O-methyl
  misc_feature (20)..(20): Phosphorothioate or Phosphorodithioate 3'-Internucleotide Linkage (optionally present)
  misc_feature (1)..(19): ribonucleotide unmodified or modified as described for this sequence
cuggcggggaagccaguggtt

SEQ ID NO: 714 - DNA, 21 bp, Artificial Sequence
  Description of Artificial Sequence: Target Sequence/siNA sense region (stab09)
  misc_feature (1)..(1): 5'-3 attached terminal deoxyabasic moiety, inverted abasic, inverted nucleotide or other terminal cap that is optionally present
  misc_feature (21)..(21): 3'-3 attached terminal deoxyabasic moiety, inverted abasic, inverted nucleotide or other terminal cap that is optionally present
  misc_feature (1)..(19): ribonucleotide unmodified or modified as described for this sequence
ccacuggcuuccccgccagtt

SEQ ID NO: 715 - DNA, 21 bp, Artificial Sequence
  Description of Artificial Sequence: Target Sequence/siNA antisense region (stab10)
  misc_feature (20)..(20): Phosphorothioate or Phosphorodithioate 3'-Internucleotide Linkage (optionally present)
  misc_feature (1)..(19): ribonucleotide unmodified or modified as described for this sequence
cuggcggggaagccaguggtt

SEQ ID NO: 716 - DNA, 21 bp, Artificial Sequence
  Description of Artificial Sequence: Target Sequence/siNA antisense region (stab19)
  misc_feature (21)..(21): 3'-3 attached terminal deoxyabasic moiety, inverted abasic, inverted nucleotide or other terminal cap that is optionally present
  misc_feature (1)..(2): 2'-deoxy-2'Fluoro
  misc_feature (3)..(4): 2'-O-methyl
  misc_feature (5)..(5): 2'-deoxy-2'Fluoro
  misc_feature (6)..(12): 2'-O-methyl
  misc_feature (13)..(14): 2'-deoxy-2'Fluoro
  misc_feature (15)..(16): 2'-O-methyl
  misc_feature (17)..(17): 2'-deoxy-2'Fluoro
  misc_feature (18)..(19): 2'-O-methyl
  misc_feature (1)..(19): ribonucleotide unmodified or modified as described for this sequence
cuggcggggaagccaguggtt

SEQ ID NO: 717 - DNA, 21 bp, Artificial Sequence
  Description of Artificial Sequence: Target Sequence/siNA antisense region (stab22)
  misc_feature (21)..(21): 3'-3 attached terminal deoxyabasic moiety, inverted abasic, inverted nucleotide or other terminal cap that is optionally present
  misc_feature (20)..(20): Phosphorothioate or Phosphorodithioate 3'-Internucleotide Linkage (optionally present)
  misc_feature (1)..(19): ribonucleotide unmodified or modified as described for this sequence
cuggcggggaagccaguggtt

SEQ ID NO: 718 - DNA, 21 bp, Artificial Sequence
  Description of Artificial Sequence: Target Sequence/siNA antisense region (stab25)
  misc_feature (4)..(4): 2'-O-methyl
  misc_feature (5)..(5): 2'-deoxy-2'Fluoro
  misc_feature (6)..(12): 2'-O-methyl
  misc_feature (13)..(14): 2'-deoxy-2'Fluoro
  misc_feature (15)..(16): 2'-O-methyl
  misc_feature (17)..(17): 2'-deoxy-2'Fluoro
  misc_feature (18)..(19): 2'-O-methyl
  misc_feature (20)..(20): Phosphorothioate or Phosphorodithioate 3'-Internucleotide Linkage (optionally present)
  misc_feature (1). .(19): ribonucleotide unmodified or modified as described for this sequence
cuggcggggaagccaguggtt

SEQ ID NO: 719 - RNA, 21 nt, Artificial Sequence
  Description of Artificial Sequence: Target Sequence/siNA antisense region (stab35)
  misc_feature (4)..(4): 2'-O-methyl
  misc_feature (5)..(5): 2'-deoxy-2'Fluoro
  misc_feature (6)..(12): 2'-O-methyl
  misc_feature (13)..(14): 2'-deoxy-2'Fluoro
  misc_feature (15)..(16): 2'-O-methyl
  misc_feature (17)..(17): 2'-deoxy-2'Fluoro
  misc_feature (18)..(21): 2'-O-methyl
cuggcggggaagccagugguu

SEQ ID NO: 720 - RNA, 21 nt, Artificial Sequence
  Description of Artificial Sequence: Target Sequence/siNA antisense region (stab36)
  misc_feature (4)..(4): 2'-O-methyl
  misc_feature (5)..(5): 2'-deoxy-2'Fluoro
  misc_feature (6)..(12): 2'-O-methyl
  misc_feature (13)..(14): 2'-deoxy-2'Fluoro
  misc_feature (15)..(16): 2'-O-methyl
  misc_feature (17)..(17): 2'-deoxy-2'Fluoro
  misc_feature (18)..(21): 2'-O-methyl
cuggcggggaagccaguggca

SEQ ID NO: 721 - RNA, 19 nt, Artificial Sequence
  Description of Artificial Sequence: Target Sequence/siNA sense region
ggggucccgcccgucuccu

SEQ ID NO: 722 - RNA, 19 nt, Artificial Sequence
  Description of Artificial Sequence: Target Sequence/siNA antisense region
aggagacgggcgggacccc

SEQ ID NO: 723 - DNA, 21 bp, Artificial Sequence
  Description of Artificial Sequence: Target Sequence/siNA sense region (stab00)
  misc_feature (1)..(19): ribonucleotide unmodified or modified as described for this sequence
ggggucccgcccgucuccutt

SEQ ID NO: 724 - DNA, 21 bp, Artificial Sequence
  Description of Artificial Sequence: Target Sequence/siNA antisense region (stab00as)
  misc_feature (1)..(19): ribonucleotide unmodified or modified as described for this sequence
aggagacgggcgggacccctt

SEQ ID NO: 725 - DNA, 21 bp, Artificial Sequence
  Description of Artificial Sequence: Target Sequence/siNA sense region (stab04)
  misc_feature (1)..(1): 5'-3 attached terminal deoxyabasic moiety, inverted abasic, inverted nucleotide or other terminal cap that is optionally present
  misc_feature (21)..(21): 3'-3 attached terminal deoxyabasic moiety, inverted abasic, inverted nucleotide or other terminal cap that is optionally present
  misc_feature (5)..(8): 2'-deoxy-2'Fluoro
  misc_feature (10)..(12): 2'-deoxy-2'Fluoro
  misc_feature (14)..(19): 2'-deoxy-2'Fluoro
  misc_feature (1). .(19): ribonucleotide unmodified or modified as described for this sequence
ggggucccgcccgucuccutt

SEQ ID NO: 726 - DNA, 21 bp, Artificial Sequence
  Description of Artificial Sequence: Target Sequence/siNA antisense region (stab05)
  misc_feature (7)..(7): 2'-deoxy-2'Fluoro
  misc_feature (11)..(11): 2'-deoxy-2'Fluoro
  misc_feature (16)..(19): 2'-deoxy-2'Fluoro
  misc_feature (20)..(20): Phosphorothioate or Phosphorodithioate 3'-Internucleotide Linkage (optionally present)
  misc_feature (1). .(19): ribonucleotide unmodified or modified as described for this sequence
aggagacgggcgggacccctt

SEQ ID NO: 727 - DNA, 21 bp, Artificial Sequence
  Description of Artificial Sequence: Target Sequence/siNA sense region (stab07)
  misc_feature (1)..(1): 5'-3 attached terminal deoxyabasic moiety, inverted abasic, inverted nucleotide or other terminal cap that is optionally present
  misc_feature (21)..(21): 3'-3 attached terminal deoxyabasic moiety, inverted abasic, inverted nucleotide or other terminal cap that is optionally present
  misc_feature (5)..(8): 2'-deoxy-2'Fluoro
  misc_feature (10)..(12): 2'-deoxy-2'Fluoro
  misc_feature (14)..(19): 2'-deoxy-2'Fluoro
  misc_feature (1)..(19): ribonucleotide unmodified or modified as described for this sequence
ggggucccgcccgucuccutt

SEQ ID NO: 728 - DNA, 21 bp, Artificial Sequence
  Description of Artificial Sequence: Target Sequence/siNA antisense region (stab08)
  misc_feature (1)..(6): 2'-O-methyl
  misc_feature (7)..(7): 2'-deoxy-2'Fluoro
  misc_feature (8)..(10): 2'-O-methyl
  misc_feature (11)..(11): 2'-deoxy-2'Fluoro
  misc_feature (12)..(15): 2'-O-methyl
  misc_feature (16)..(19): 2'-deoxy-2'Fluoro
  misc_feature (20)..(20): Phosphorothioate or Phosphorodithioate 3'-Internucleotide Linkage (optionally present)
  misc_feature (1)..(19): ribonucleotide unmodified or modified as described for this sequence
aggagacgggcgggacccctt

SEQ ID NO: 729 - DNA, 21 bp, Artificial Sequence
  Description of Artificial Sequence: Target Sequence/siNA sense region (stab09)
  misc_feature (1)..(1): 5'-3 attached terminal deoxyabasic moiety, inverted abasic, inverted nucleotide or other terminal cap that is optionally present
  misc_feature (21)..(21): 3'-3 attached terminal deoxyabasic moiety, inverted abasic, inverted nucleotide or other terminal cap that is optionally present
  misc_feature (1)..(19): ribonucleotide unmodified or modified as described for this sequence
ggggucccgcccgucuccutt

SEQ ID NO: 730 - DNA, 21 bp, Artificial Sequence
  Description of Artificial Sequence: Target Sequence/siNA antisense region (stab10)
  misc_feature (20)..(20): Phosphorothioate or Phosphorodithioate 3'-Internucleotide Linkage (optionally present)
  misc_feature (1)..(19): ribonucleotide unmodified or modified as described for this sequence
aggagacgggcgggacccctt

SEQ ID NO: 731 - DNA, 21 bp, Artificial Sequence
  Description of Artificial Sequence: Target Sequence/siNA antisense region (stab19)
  misc_feature (21)..(21): 3'-3 attached terminal deoxyabasic moiety, inverted abasic, inverted nucleotide or other terminal cap that is optionally present
  misc_feature (1)..(6): 2'-O-methyl
  misc_feature (7)..(7): 2'-deoxy-2'Fluoro
  misc_feature (8)..(10): 2'-O-methyl
  misc_feature (11)..(11): 2'-deoxy-2'Fluoro
  misc_feature (12)..(15): 2'-O-methyl
  misc_feature (16)..(19): 2'-deoxy-2'Fluoro
  misc_feature (1)..(19): ribonucleotide unmodified or modified as described for this sequence
aggagacgggcgggacccctt

SEQ ID NO: 732 - DNA, 21 bp, Artificial Sequence
  Description of Artificial Sequence: Target Sequence/siNA antisense region (stab22)
  misc_feature (21)..(21): 3'-3 attached terminal deoxyabasic moiety, inverted abasic, inverted nucleotide or other terminal cap that is optionally present
  misc_feature (20)..(20): Phosphorothioate or Phosphorodithioate 3'-Internucleotide Linkage (optionally present)
  misc_feature (1)..(19): ribonucleotide unmodified or modified as described for this sequence
aggagacgggcgggacccctt

SEQ ID NO: 733 - DNA, 21 bp, Artificial Sequence
  Description of Artificial Sequence: Target Sequence/siNA antisense region (stab25)
  misc_feature (4)..(6): 2'-O-methyl
  misc_feature (7)..(7): 2'-deoxy-2'Fluoro
  misc_feature (8)..(10): 2'-O-methyl
  misc_feature (11)..(11): 2'-deoxy-2'Fluoro
  misc_feature (12)..(15): 2'-O-methyl
  misc_feature (16)..(19): 2'-deoxy-2'Fluoro
  misc_feature (20)..(20): Phosphorothioate or Phosphorodithioate 3'-Internucleotide Linkage (optionally present)
  misc_feature (1). .(19): ribonucleotide unmodified or modified as described for this sequence
aggagacgggcgggacccctt

SEQ ID NO: 734 - RNA, 21 nt, Artificial Sequence
  Description of Artificial Sequence: Target Sequence/siNA antisense region (stab35)
  misc_feature (4)..(6): 2'-O-methyl
  misc_feature (7)..(7): 2'-deoxy-2'Fluoro
  misc_feature (8)..(10): 2'-O-methyl
  misc_feature (11)..(11): 2'-deoxy-2'Fluoro
  misc_feature (12)..(15): 2'-O-methyl
  misc_feature (16)..(19): 2'-deoxy-2'Fluoro
  misc_feature (20)..(21): 2'-O-methyl
aggagacgggcgggaccccuu

SEQ ID NO: 735 - RNA, 21 nt, Artificial Sequence
  Description of Artificial Sequence: Target Sequence/siNA antisense region (stab36)
  misc_feature (4)..(6): 2'-O-methyl
  misc_feature (7)..(7): 2'-deoxy-2'Fluoro
  misc_feature (8)..(10): 2'-O-methyl
  misc_feature (11)..(11): 2'-deoxy-2'Fluoro
  misc_feature (12)..(15): 2'-O-methyl
  misc_feature (16)..(19): 2'-deoxy-2'Fluoro
  misc_feature (20)..(21): 2'-O-methyl
aggagacgggcgggaccccug

SEQ ID NO: 736 - RNA, 19 nt, Artificial Sequence
  Description of Artificial Sequence: Target Sequence/siNA sense region
uugcacacccagguccaga

SEQ ID NO: 737 - RNA, 19 nt, Artificial Sequence
  Description of Artificial Sequence: Target Sequence/siNA antisense region
ucuggaccugggugugcaa

SEQ ID NO: 738 - DNA, 21 bp, Artificial Sequence
  Description of Artificial Sequence: Target Sequence/siNA sense region (stab00)
  misc_feature (1)..(19): ribonucleotide unmodified or modified as described for this sequence
uugcacacccagguccagatt

SEQ ID NO: 739 - DNA, 21 bp, Artificial Sequence
  Description of Artificial Sequence: Target Sequence/siNA antisense region (stab00as)
  misc_feature (1)..(19): ribonucleotide unmodified or modified as described for this sequence
ucuggaccugggugugcaatt

SEQ ID NO: 740 - DNA, 21 bp, Artificial Sequence
  Description of Artificial Sequence: Target Sequence/siNA sense region (stab04)
  misc_feature (1)..(1): 5'-3 attached terminal deoxyabasic moiety, inverted abasic, inverted nucleotide or other terminal cap that is optionally present
  misc_feature (21)..(21): 3'-3 attached terminal deoxyabasic moiety, inverted abasic, inverted nucleotide or other terminal cap that is optionally present
  misc_feature (1)..(2): 2'-deoxy-2'Fluoro
  misc_feature (4)..(4): 2'-deoxy-2'Fluoro
  misc_feature (6)..(6): 2'-deoxy-2'Fluoro
  misc_feature (8)..(10): 2'-deoxy-2'Fluoro
  misc_feature (14)..(16): 2'-deoxy-2'Fluoro
  misc_feature (1). .(19): ribonucleotide unmodified or modified as described for this sequence
uugcacacccagguccagatt

SEQ ID NO: 741 - DNA, 21 bp, Artificial Sequence
  Description of Artificial Sequence: Target Sequence/siNA antisense region (stab05)
  misc_feature (1)..(3): 2'-deoxy-2'Fluoro
  misc_feature (7)..(9): 2'-deoxy-2'Fluoro
  misc_feature (13)..(13): 2'-deoxy-2'Fluoro
  misc_feature (15)..(15): 2'-deoxy-2'Fluoro
  misc_feature (17)..(17): 2'-deoxy-2'Fluoro
  misc_feature (20)..(20): Phosphorothioate or Phosphorodithioate 3'-Internucleotide Linkage (optionally present)
  misc_feature (1). .(19): ribonucleotide unmodified or modified as described for this sequence
ucuggaccugggugugcaatt

SEQ ID NO: 742 - DNA, 21 bp, Artificial Sequence
  Description of Artificial Sequence: Target Sequence/siNA sense region (stab07)
  misc_feature (1)..(1): 5'-3 attached terminal deoxyabasic moiety, inverted abasic, inverted nucleotide or other terminal cap that is optionally present
  misc_feature (21)..(21): 3'-3 attached terminal deoxyabasic moiety, inverted abasic, inverted nucleotide or other terminal cap that is optionally present
  misc_feature (1)..(2): 2'-deoxy-2'Fluoro
  misc_feature (4)..(4): 2'-deoxy-2'Fluoro
  misc_feature (6)..(6): 2'-deoxy-2'Fluoro
  misc_feature (8)..(10): 2'-deoxy-2'Fluoro
  misc_feature (14)..(16): 2'-deoxy-2'Fluoro
  misc_feature (1)..(19): ribonucleotide unmodified or modified as described for this sequence
uugcacacccagguccagatt

SEQ ID NO: 743 - DNA, 21 bp, Artificial Sequence
  Description of Artificial Sequence: Target Sequence/siNA antisense region (stab08)
  misc_feature (1)..(3): 2'-deoxy-2'Fluoro
  misc_feature (4)..(6): 2'-O-methyl
  misc_feature (7)..(9): 2'-deoxy-2'Fluoro
  misc_feature (10)..(12): 2'-O-methyl
  misc_feature (13)..(13): 2'-deoxy-2'Fluoro
  misc_feature (14)..(14): 2'-O-methyl
  misc_feature (15)..(15): 2'-deoxy-2'Fluoro
  misc_feature (16)..(16): 2'-O-methyl
  misc_feature (17)..(17): 2'-deoxy-2'Fluoro
  misc_feature (18)..(19): 2'-O-methyl
  misc_feature (20)..(20): Phosphorothioate or Phosphorodithioate 3'-Internucleotide Linkage (optionally present)
  misc_feature (1)..(19): ribonucleotide unmodified or modified as described for this sequence
ucuggaccugggugugcaatt

SEQ ID NO: 744 - DNA, 21 bp, Artificial Sequence
  Description of Artificial Sequence: Target Sequence/siNA sense region (stab09)
  misc_feature (1)..(1): 5'-3 attached terminal deoxyabasic moiety, inverted abasic, inverted nucleotide or other terminal cap that is optionally present
  misc_feature (21)..(21): 3'-3 attached terminal deoxyabasic moiety, inverted abasic, inverted nucleotide or other terminal cap that is optionally present
  misc_feature (1)..(19): ribonucleotide unmodified or modified as described for this sequence
uugcacacccagguccagatt

SEQ ID NO: 745 - DNA, 21 bp, Artificial Sequence
  Description of Artificial Sequence: Target Sequence/siNA antisense region (stab10)
  misc_feature (20)..(20): Phosphorothioate or Phosphorodithioate 3'-Internucleotide Linkage (optionally present)
  misc_feature (1)..(19): ribonucleotide unmodified or modified as described for this sequence
ucuggaccugggugugcaatt

SEQ ID NO: 746 - DNA, 21 bp, Artificial Sequence
  Description of Artificial Sequence: Target Sequence/siNA antisense region (stab19)
  misc_feature (21)..(21): 3'-3 attached terminal deoxyabasic moiety, inverted abasic, inverted nucleotide or other terminal cap that is optionally present
  misc_feature (1)..(3): 2'-deoxy-2'Fluoro
  misc_feature (4)..(6): 2'-O-methyl
  misc_feature (7)..(9): 2'-deoxy-2'Fluoro
  misc_feature (10)..(12): 2'-O-methyl
  misc_feature (13)..(13): 2'-deoxy-2'Fluoro
  misc_feature (14)..(14): 2'-O-methyl
  misc_feature (15)..(15): 2'-deoxy-2'Fluoro
  misc_feature (16)..(16): 2'-O-methyl
  misc_feature (17)..(17): 2'-deoxy-2'Fluoro
  misc_feature (18)..(19): 2'-O-methyl
  misc_feature (1)..(19): ribonucleotide unmodified or modified as described for this sequence
ucuggaccugggugugcaatt

SEQ ID NO: 747 - DNA, 21 bp, Artificial Sequence
  Description of Artificial Sequence: Target Sequence/siNA antisense region (stab22)
  misc_feature (21)..(21): 3'-3 attached terminal deoxyabasic moiety, inverted abasic, inverted nucleotide or other terminal cap that is optionally present
  misc_feature (20)..(20): Phosphorothioate or Phosphorodithioate 3'-Internucleotide Linkage (optionally present)
  misc_feature (1)..(19): ribonucleotide unmodified or modified as described for this sequence
ucuggaccugggugugcaatt

SEQ ID NO: 748 - DNA, 21 bp, Artificial Sequence
  Description of Artificial Sequence: Target Sequence/siNA antisense region (stab25)
  misc_feature (4)..(6): 2'-O-methyl
  misc_feature (7)..(9): 2'-deoxy-2'Fluoro
  misc_feature (10)..(12): 2'-O-methyl
  misc_feature (13)..(13): 2'-deoxy-2'Fluoro
  misc_feature (14)..(14): 2'-O-methyl
  misc_feature (15)..(15): 2'-deoxy-2'Fluoro
  misc_feature (16)..(16): 2'-O-methyl
  misc_feature (17)..(17): 2'-deoxy-2'Fluoro
  misc_feature (18)..(19): 2'-O-methyl
  misc_feature (20)..(20): Phosphorothioate or Phosphorodithioate 3'-Internucleotide Linkage (optionally present)
  misc_feature (1). .(19): ribonucleotide unmodified or modified as described for this sequence
ucuggaccugggugugcaatt

SEQ ID NO: 749 - RNA, 21 nt, Artificial Sequence
  Description of Artificial Sequence: Target Sequence/siNA antisense region (stab35)
  misc_feature (4)..(6): 2'-O-methyl
  misc_feature (7)..(9): 2'-deoxy-2'Fluoro
  misc_feature (10)..(12): 2'-O-methyl
  misc_feature (13)..(13): 2'-deoxy-2'Fluoro
  misc_feature (14)..(14): 2'-O-methyl
  misc_feature (15)..(15): 2'-deoxy-2'Fluoro
  misc_feature (16)..(16): 2'-O-methyl
  misc_feature (17)..(17): 2'-deoxy-2'Fluoro
  misc_feature (18)..(21): 2'-O-methyl
ucuggaccugggugugcaauu

SEQ ID NO: 750 - RNA, 21 nt, Artificial Sequence
  Description of Artificial Sequence: Target Sequence/siNA antisense region (stab36)
  misc_feature (4)..(6): 2'-O-methyl
  misc_feature (7)..(9): 2'-deoxy-2'Fluoro
  misc_feature (10)..(12): 2'-O-methyl
  misc_feature (13)..(13): 2'-deoxy-2'Fluoro
  misc_feature (14)..(14): 2'-O-methyl
  misc_feature (15)..(15): 2'-deoxy-2'Fluoro
  misc_feature (16)..(16): 2'-O-methyl
  misc_feature (17)..(17): 2'-deoxy-2'Fluoro
  misc_feature (18)..(21): 2'-O-methyl
ucuggaccugggugugcaagg

SEQ ID NO: 751 - RNA, 19 nt, Artificial Sequence
  Description of Artificial Sequence: Target Sequence/siNA sense region
aguguggucccccagcagc

SEQ ID NO: 752 - RNA, 19 nt, Artificial Sequence
  Description of Artificial Sequence: Target Sequence/siNA antisense region
gcugcugggggaccacacu

SEQ ID NO: 753 - DNA, 21 bp, Artificial Sequence
  Description of Artificial Sequence: Target Sequence/siNA sense region (stab00)
  misc_feature (1)..(19): ribonucleotide unmodified or modified as described for this sequence
aguguggucccccagcagctt

SEQ ID NO: 754 - DNA, 21 bp, Artificial Sequence
  Description of Artificial Sequence: Target Sequence/siNA antisense region (stab00as)
  misc_feature (1)..(19): ribonucleotide unmodified or modified as described for this sequence
gcugcugggggaccacacutt

SEQ ID NO: 755 - DNA, 21 bp, Artificial Sequence
  Description of Artificial Sequence: Target Sequence/siNA sense region (stab04)
  misc_feature (1)..(1): 5'-3 attached terminal deoxyabasic moiety, inverted abasic, inverted nucleotide or other terminal cap that is optionally present
  misc_feature (21)..(21): 3'-3 attached terminal deoxyabasic moiety, inverted abasic, inverted nucleotide or other terminal cap that is optionally present
  misc_feature (3)..(3): 2'-deoxy-2'Fluoro
  misc_feature (5)..(5): 2'-deoxy-2'Fluoro
  misc_feature (8)..(13): 2'-deoxy-2'Fluoro
  misc_feature (16)..(16): 2'-deoxy-2'Fluoro
  misc_feature (19)..(19): 2'-deoxy-2'Fluoro
  misc_feature (1). .(19): ribonucleotide unmodified or modified as described for this sequence
aguguggucccccagcagctt

SEQ ID NO: 756 - DNA, 21 bp, Artificial Sequence
  Description of Artificial Sequence: Target Sequence/siNA antisense region (stab05)
  misc_feature (2)..(3): 2'-deoxy-2'Fluoro
  misc_feature (5)..(6): 2'-deoxy-2'Fluoro
  misc_feature (13)..(14): 2'-deoxy-2'Fluoro
  misc_feature (16)..(16): 2'-deoxy-2'Fluoro
  misc_feature (18)..(19): 2'-deoxy-2'Fluoro
  misc_feature (20)..(20): Phosphorothioate or Phosphorodithioate 3'-Internucleotide Linkage (optionally present)
  misc_feature (1). .(19): ribonucleotide unmodified or modified as described for this sequence
gcugcugggggaccacacutt

SEQ ID NO: 757 - DNA, 21 bp, Artificial Sequence
  Description of Artificial Sequence: Target Sequence/siNA sense region (stab07)
  misc_feature (1)..(1): 5'-3 attached terminal deoxyabasic moiety, inverted abasic, inverted nucleotide or other terminal cap that is optionally present
  misc_feature (21)..(21): 3'-3 attached terminal deoxyabasic moiety, inverted abasic, inverted nucleotide or other terminal cap that is optionally present
  misc_feature (3)..(3): 2'-deoxy-2'Fluoro
  misc_feature (5)..(5): 2'-deoxy-2'Fluoro
  misc_feature (8)..(13): 2'-deoxy-2'Fluoro
  misc_feature (16)..(16): 2'-deoxy-2'Fluoro
  misc_feature (19)..(19): 2'-deoxy-2'Fluoro
  misc_feature (1)..(19): ribonucleotide unmodified or modified as described for this sequence
aguguggucccccagcagctt

SEQ ID NO: 758 - DNA, 21 bp, Artificial Sequence
  Description of Artificial Sequence: Target Sequence/siNA antisense region (stab08)
  misc_feature (1)..(1): 2'-O-methyl
  misc_feature (2)..(3): 2'-deoxy-2'Fluoro
  misc_feature (4)..(4): 2'-O-methyl
  misc_feature (5)..(6): 2'-deoxy-2'Fluoro
  misc_feature (7)..(12): 2'-O-methyl
  misc_feature (13)..(14): 2'-deoxy-2'Fluoro
  misc_feature (15)..(15): 2'-O-methyl
  misc_feature (16)..(16): 2'-deoxy-2'Fluoro
  misc_feature (17)..(17): 2'-O-methyl
  misc_feature (18)..(19): 2'-deoxy-2'Fluoro
  misc_feature (20)..(20): Phosphorothioate or Phosphorodithioate 3'-Internucleotide Linkage (optionally present)
  misc_feature (1)..(19): ribonucleotide unmodified or modified as described for this sequence
gcugcugggggaccacacutt

SEQ ID NO: 759 - DNA, 21 bp, Artificial Sequence
  Description of Artificial Sequence: Target Sequence/siNA sense region (stab09)
  misc_feature (1)..(1): 5'-3 attached terminal deoxyabasic moiety, inverted abasic, inverted nucleotide or other terminal cap that is optionally present
  misc_feature (21)..(21): 3'-3 attached terminal deoxyabasic moiety, inverted abasic, inverted nucleotide or other terminal cap that is optionally present
  misc_feature (1)..(19): ribonucleotide unmodified or modified as described for this sequence
aguguggucccccagcagctt

SEQ ID NO: 760 - DNA, 21 bp, Artificial Sequence
  Description of Artificial Sequence: Target Sequence/siNA antisense region (stab10)
  misc_feature (20)..(20): Phosphorothioate or Phosphorodithioate 3'-Internucleotide Linkage (optionally present)
  misc_feature (1)..(19): ribonucleotide unmodified or modified as described for this sequence
gcugcugggggaccacacutt

SEQ ID NO: 761 - DNA, 21 bp, Artificial Sequence
  Description of Artificial Sequence: Target Sequence/siNA antisense region (stab19)
  misc_feature (21)..(21): 3'-3 attached terminal deoxyabasic moiety, inverted abasic, inverted nucleotide or other terminal cap that is optionally present
  misc_feature (1)..(1): 2'-O-methyl
  misc_feature (2)..(3): 2'-deoxy-2'Fluoro
  misc_feature (4)..(4): 2'-O-methyl
  misc_feature (5)..(6): 2'-deoxy-2'Fluoro
  misc_feature (7)..(12): 2'-O-methyl
  misc_feature (13)..(14): 2'-deoxy-2'Fluoro
  misc_feature (15)..(15): 2'-O-methyl
  misc_feature (16)..(16): 2'-deoxy-2'Fluoro
  misc_feature (17)..(17): 2'-O-methyl
  misc_feature (18)..(19): 2'-deoxy-2'Fluoro
  misc_feature (1)..(19): ribonucleotide unmodified or modified as described for this sequence
gcugcugggggaccacacutt

SEQ ID NO: 762 - DNA, 21 bp, Artificial Sequence
  Description of Artificial Sequence: Target Sequence/siNA antisense region (stab22)
  misc_feature (21)..(21): 3'-3 attached terminal deoxyabasic moiety, inverted abasic, inverted nucleotide or other terminal cap that is optionally present
  misc_feature (20)..(20): Phosphorothioate or Phosphorodithioate 3'-Internucleotide Linkage (optionally present)
  misc_feature (1)..(19): ribonucleotide unmodified or modified as described for this sequence
gcugcugggggaccacacutt

SEQ ID NO: 763 - DNA, 21 bp, Artificial Sequence
  Description of Artificial Sequence: Target Sequence/siNA antisense region (stab25)
  misc_feature (4)..(4): 2'-O-methyl
  misc_feature (5)..(6): 2'-deoxy-2'Fluoro
  misc_feature (7)..(12): 2'-O-methyl
  misc_feature (13)..(14): 2'-deoxy-2'Fluoro
  misc_feature (15)..(15): 2'-O-methyl
  misc_feature (16)..(16): 2'-deoxy-2'Fluoro
  misc_feature (17)..(17): 2'-O-methyl
  misc_feature (18)..(19): 2'-deoxy-2'Fluoro
  misc_feature (20)..(20): Phosphorothioate or Phosphorodithioate 3'-Internucleotide Linkage (optionally present)
  misc_feature (1). .(19): ribonucleotide unmodified or modified as described for this sequence
gcugcugggggaccacacutt

SEQ ID NO: 764 - RNA, 21 nt, Artificial Sequence
  Description of Artificial Sequence: Target Sequence/siNA antisense region (stab35)
  misc_feature (4)..(4): 2'-O-methyl
  misc_feature (5)..(6): 2'-deoxy-2'Fluoro
  misc_feature (7)..(12): 2'-O-methyl
  misc_feature (13)..(14): 2'-deoxy-2'Fluoro
  misc_feature (15)..(15): 2'-O-methyl
  misc_feature (16)..(16): 2'-deoxy-2'Fluoro
  misc_feature (17)..(17): 2'-O-methyl
  misc_feature (18)..(19): 2'-deoxy-2'Fluoro
  misc_feature (20)..(21): 2'-O-methyl
gcugcugggggaccacacuuu

SEQ ID NO: 765 - RNA, 21 nt, Artificial Sequence
  Description of Artificial Sequence: Target Sequence/siNA antisense region (stab36)
  misc_feature (4)..(4): 2'-O-methyl
  misc_feature (5)..(6): 2'-deoxy-2'Fluoro
  misc_feature (7)..(12): 2'-O-methyl
  misc_feature (13)..(14): 2'-deoxy-2'Fluoro
  misc_feature (15)..(15): 2'-O-methyl
  misc_feature (16)..(16): 2'-deoxy-2'Fluoro
  misc_feature (17)..(17): 2'-O-methyl
  misc_feature (18)..(19): 2'-deoxy-2'Fluoro
  misc_feature (20)..(21): 2'-O-methyl
gcugcugggggaccacacucu

SEQ ID NO: 766 - RNA, 19 nt, Artificial Sequence
  Description of Artificial Sequence: Target Sequence/siNA sense region
cuacugacagucacagcug

SEQ ID NO: 767 - RNA, 19 nt, Artificial Sequence
  Description of Artificial Sequence: Target Sequence/siNA antisense region
cagcugugacugucaguag

SEQ ID NO: 768 - DNA, 21 bp, Artificial Sequence
  Description of Artificial Sequence: Target Sequence/siNA sense region (stab00)
cuacugacagucacagcugtt

SEQ ID NO: 769 - DNA, 21 bp, Artificial Sequence
  Description of Artificial Sequence: Target Sequence/siNA antisense region (stab00as)
cagcugugacugucaguagtt

SEQ ID NO: 770 - DNA, 21 bp, Artificial Sequence
  Description of Artificial Sequence: Target Sequence/siNA sense region (stab04)
  misc_feature (1)..(1): 5'-3 attached terminal deoxyabasic moiety, inverted abasic, inverted nucleotide or other terminal cap that is optionally present
  misc_feature (21)..(21): 3'-3 attached terminal deoxyabasic moiety, inverted abasic, inverted nucleotide or other terminal cap that is optionally present
  misc_feature (1)..(2): 2'-deoxy-2'Fluoro
  misc_feature (4)..(5): 2'-deoxy-2'Fluoro
  misc_feature (8)..(8): 2'-deoxy-2'Fluoro
  misc_feature (11)..(12): 2'-deoxy-2'Fluoro
  misc_feature (14)..(14): 2'-deoxy-2'Fluoro
  misc_feature (17)..(18): 2'-deoxy-2'Fluoro
  misc_feature (1). .(19): ribonucleotide unmodified or modified as described for this sequence
cuacugacagucacagcugtt

SEQ ID NO: 771 - DNA, 21 bp, Artificial Sequence
  Description of Artificial Sequence: Target Sequence/siNA antisense region (stab05)
  misc_feature (1)..(1): 2'-deoxy-2'Fluoro
  misc_feature (4)..(5): 2'-deoxy-2'Fluoro
  misc_feature (7)..(7): 2'-deoxy-2'Fluoro
  misc_feature (10)..(11): 2'-deoxy-2'Fluoro
  misc_feature (13)..(14): 2'-deoxy-2'Fluoro
  misc_feature (17)..(17): 2'-deoxy-2'Fluoro
  misc_feature (20)..(20): Phosphorothioate or Phosphorodithioate 3'-Internucleotide Linkage (optionally present)
  misc_feature (1). .(19): ribonucleotide unmodified or modified as described for this sequence
cagcugugacugucaguagtt

SEQ ID NO: 772 - DNA, 21 bp, Artificial Sequence
  Description of Artificial Sequence: Target Sequence/siNA sense region (stab07)
  misc_feature (1)..(1): 5'-3 attached terminal deoxyabasic moiety, inverted abasic, inverted nucleotide or other terminal cap that is optionally present
  misc_feature (21)..(21): 3'-3 attached terminal deoxyabasic moiety, inverted abasic, inverted nucleotide or other terminal cap that is optionally present
  misc_feature (1)..(2): 2'-deoxy-2'Fluoro
  misc_feature (4)..(5): 2'-deoxy-2'Fluoro
  misc_feature (8)..(8): 2'-deoxy-2'Fluoro
  misc_feature (11)..(12): 2'-deoxy-2'Fluoro
  misc_feature (14)..(14): 2'-deoxy-2'Fluoro
  misc_feature (17)..(18): 2'-deoxy-2'Fluoro
  misc_feature (1)..(19): ribonucleotide unmodified or modified as described for this sequence
cuacugacagucacagcugtt

SEQ ID NO: 773 - DNA, 21 bp, Artificial Sequence
  Description of Artificial Sequence: Target Sequence/siNA antisense region (stab08)
  misc_feature (1)..(1): 2'-deoxy-2'Fluoro
  misc_feature (2)..(3): 2'-O-methyl
  misc_feature (4)..(5): 2'-deoxy-2'Fluoro
  misc_feature (6)..(6): 2'-O-methyl
  misc_feature (7)..(7): 2'-deoxy-2'Fluoro
  misc_feature (8)..(9): 2'-O-methyl
  misc_feature (10)..(11): 2'-deoxy-2'Fluoro
  misc_feature (12)..(12): 2'-O-methyl
  misc_feature (13)..(14): 2'-deoxy-2'Fluoro
  misc_feature (15)..(16): 2'-O-methyl
  misc_feature (17)..(17): 2'-deoxy-2'Fluoro
  misc_feature (18)..(19): 2'-O-methyl
  misc_feature (20)..(20): Phosphorothioate or Phosphorodithioate 3'-Internucleotide Linkage (optionally present)
  misc_feature (1)..(19): ribonucleotide unmodified or modified as described for this sequence
cagcugugacugucaguagtt

SEQ ID NO: 774 - DNA, 21 bp, Artificial Sequence
  Description of Artificial Sequence: Target Sequence/siNA sense region (stab09)
  misc_feature (1)..(1): 5'-3 attached terminal deoxyabasic moiety, inverted abasic, inverted nucleotide or other terminal cap that is optionally present
  misc_feature (21)..(21): 3'-3 attached terminal deoxyabasic moiety, inverted abasic, inverted nucleotide or other terminal cap that is optionally present
  misc_feature (1)..(19): ribonucleotide unmodified or modified as described for this sequence
cuacugacagucacagcugtt

SEQ ID NO: 775 - DNA, 21 bp, Artificial Sequence
  Description of Artificial Sequence: Target Sequence/siNA antisense region (stab10)
  misc_feature (20)..(20): Phosphorothioate or Phosphorodithioate 3'-Internucleotide Linkage (optionally present)
  misc_feature (1)..(19): ribonucleotide unmodified or modified as described for this sequence
cagcugugacugucaguagtt

SEQ ID NO: 776 - DNA, 21 bp, Artificial Sequence
  Description of Artificial Sequence: Target Sequence/siNA antisense region (stab19)
  misc_feature (21)..(21): 3'-3 attached terminal deoxyabasic moiety, inverted abasic, inverted nucleotide or other terminal cap that is optionally present
  misc_feature (1)..(1): 2'-deoxy-2'Fluoro
  misc_feature (2)..(3): 2'-O-methyl
  misc_feature (4)..(5): 2'-deoxy-2'Fluoro
  misc_feature (6)..(6): 2'-O-methyl
  misc_feature (7)..(7): 2'-deoxy-2'Fluoro
  misc_feature (8)..(9): 2'-O-methyl
  misc_feature (10)..(11): 2'-deoxy-2'Fluoro
  misc_feature (12)..(12): 2'-O-methyl
  misc_feature (13)..(14): 2'-deoxy-2'Fluoro
  misc_feature (15)..(16): 2'-O-methyl
  misc_feature (17)..(17): 2'-deoxy-2'Fluoro
  misc_feature (18)..(19): 2'-O-methyl
  misc_feature (1)..(19): ribonucleotide unmodified or modified as described for this sequence
cagcugugacugucaguagtt

SEQ ID NO: 777 - DNA, 21 bp, Artificial Sequence
  Description of Artificial Sequence: Target Sequence/siNA antisense region (stab22)
  misc_feature (21)..(21): 3'-3 attached terminal deoxyabasic moiety, inverted abasic, inverted nucleotide or other terminal cap that is optionally present
  misc_feature (20)..(20): Phosphorothioate or Phosphorodithioate 3'-Internucleotide Linkage (optionally present)
  misc_feature (1)..(19): ribonucleotide unmodified or modified as described for this sequence
cagcugugacugucaguagtt

SEQ ID NO: 778 - DNA, 21 bp, Artificial Sequence
  Description of Artificial Sequence: Target Sequence/siNA antisense region (stab25)
  misc_feature (4)..(5): 2'-deoxy-2'Fluoro
  misc_feature (6)..(6): 2'-O-methyl
  misc_feature (7)..(7): 2'-deoxy-2'Fluoro
  misc_feature (8)..(9): 2'-O-methyl
  misc_feature (10)..(11): 2'-deoxy-2'Fluoro
  misc_feature (12)..(12): 2'-O-methyl
  misc_feature (13)..(14): 2'-deoxy-2'Fluoro
  misc_feature (15)..(16): 2'-O-methyl
  misc_feature (17)..(17): 2'-deoxy-2'Fluoro
  misc_feature (18)..(19): 2'-O-methyl
  misc_feature (20)..(20): Phosphorothioate or Phosphorodithioate 3'-Internucleotide Linkage (optionally present)
  misc_feature (1). .(19): ribonucleotide unmodified or modified as described for this sequence
cagcugugacugucaguagtt

SEQ ID NO: 779 - RNA, 21 nt, Artificial Sequence
  Description of Artificial Sequence: Target Sequence/siNA antisense region (stab35)
  misc_feature (4)..(5): 2'-deoxy-2'Fluoro
  misc_feature (6)..(6): 2'-O-methyl
  misc_feature (7)..(7): 2'-deoxy-2'Fluoro
  misc_feature (8)..(9): 2'-O-methyl
  misc_feature (10)..(11): 2'-deoxy-2'Fluoro
  misc_feature (12)..(12): 2'-O-methyl
  misc_feature (13)..(14): 2'-deoxy-2'Fluoro
  misc_feature (15)..(16): 2'-O-methyl
  misc_feature (17)..(17): 2'-deoxy-2'Fluoro
  misc_feature (18)..(21): 2'-O-methyl
cagcugugacugucaguaguu

SEQ ID NO: 780 - RNA, 21 nt, Artificial Sequence
  Description of Artificial Sequence: Target Sequence/siNA antisense region (stab36)
  misc_feature (4)..(5): 2'-deoxy-2'Fluoro
  misc_feature (6)..(6): 2'-O-methyl
  misc_feature (7)..(7): 2'-deoxy-2'Fluoro
  misc_feature (8)..(9): 2'-O-methyl
  misc_feature (10)..(11): 2'-deoxy-2'Fluoro
  misc_feature (12)..(12): 2'-O-methyl
  misc_feature (13)..(14): 2'-deoxy-2'Fluoro
  misc_feature (15)..(16): 2'-O-methyl
  misc_feature (17)..(17): 2'-deoxy-2'Fluoro
  misc_feature (18)..(21): 2'-O-methyl
cagcugugacugucaguagcu

SEQ ID NO: 781 - RNA, 19 nt, Artificial Sequence
  Description of Artificial Sequence: Target Sequence/siNA sense region
gcccccacggcagccccug

SEQ ID NO: 782 - RNA, 19 nt, Artificial Sequence
  Description of Artificial Sequence: Target Sequence/siNA antisense region
caggggcugccgugggggc

SEQ ID NO: 783 - DNA, 21 bp, Artificial Sequence
  Description of Artificial Sequence: Target Sequence/siNA sense region (stab00)
  misc_feature (1)..(19): ribonucleotide unmodified or modified as described for this sequence
gcccccacggcagccccugtt

SEQ ID NO: 784 - DNA, 21 bp, Artificial Sequence
  Description of Artificial Sequence: Target Sequence/siNA antisense region (stab00as)
  misc_feature (1)..(19): ribonucleotide unmodified or modified as described for this sequence
caggggcugccgugggggctt

SEQ ID NO: 785 - DNA, 21 bp, Artificial Sequence
  Description of Artificial Sequence: Target Sequence/siNA sense region (stab04)
  misc_feature (1)..(1): 5'-3 attached terminal deoxyabasic moiety, inverted abasic, inverted nucleotide or other terminal cap that is optionally present
  misc_feature (21)..(21): 3'-3 attached terminal deoxyabasic moiety, inverted abasic, inverted nucleotide or other terminal cap that is optionally present
  misc_feature (2)..(6): 2'-deoxy-2'Fluoro
  misc_feature (8)..(8): 2'-deoxy-2'Fluoro
  misc_feature (11)..(11): 2'-deoxy-2'Fluoro
  misc_feature (14)..(18): 2'-deoxy-2'Fluoro
  misc_feature (1). .(19): ribonucleotide unmodified or modified as described for this sequence
gcccccacggcagccccugtt

SEQ ID NO: 786 - DNA, 21 bp, Artificial Sequence
  Description of Artificial Sequence: Target Sequence/siNA antisense region (stab05)
  misc_feature (1)..(1): 2'-deoxy-2'Fluoro
  misc_feature (7)..(8): 2'-deoxy-2'Fluoro
  misc_feature (10)..(11): 2'-deoxy-2'Fluoro
  misc_feature (13)..(13): 2'-deoxy-2'Fluoro
  misc_feature (19)..(19): 2'-deoxy-2'Fluoro
  misc_feature (20)..(20): Phosphorothioate or Phosphorodithioate 3'-Internucleotide Linkage (optionally present)
  misc_feature (1). .(19): ribonucleotide unmodified or modified as described for this sequence
caggggcugccgugggggctt

SEQ ID NO: 787 - DNA, 21 bp, Artificial Sequence
  Description of Artificial Sequence: Target Sequence/siNA sense region (stab07)
  misc_feature (1)..(1): 5'-3 attached terminal deoxyabasic moiety, inverted abasic, inverted nucleotide or other terminal cap that is optionally present
  misc_feature (21)..(21): 3'-3 attached terminal deoxyabasic moiety, inverted abasic, inverted nucleotide or other terminal cap that is optionally present
  misc_feature (2)..(6): 2'-deoxy-2'Fluoro
  misc_feature (8)..(8): 2'-deoxy-2'Fluoro
  misc_feature (11)..(11): 2'-deoxy-2'Fluoro
  misc_feature (14)..(18): 2'-deoxy-2'Fluoro
  misc_feature (1)..(19): ribonucleotide unmodified or modified as described for this sequence
gcccccacggcagccccugtt

SEQ ID NO: 788 - DNA, 21 bp, Artificial Sequence
  Description of Artificial Sequence: Target Sequence/siNA antisense region (stab08)
  misc_feature (1)..(1): 2'-deoxy-2'Fluoro
  misc_feature (2)..(6): 2'-O-methyl
  misc_feature (7)..(8): 2'-deoxy-2'Fluoro
  misc_feature (9)..(9): 2'-O-methyl
  misc_feature (10)..(11): 2'-deoxy-2'Fluoro
  misc_feature (12)..(12): 2'-O-methyl
  misc_feature (13)..(13): 2'-deoxy-2'Fluoro
  misc_feature (14)..(18): 2'-O-methyl
  misc_feature (19)..(19): 2'-deoxy-2'Fluoro
  misc_feature (20)..(20): Phosphorothioate or Phosphorodithioate 3'-Internucleotide Linkage (optionally present)
  misc_feature (1)..(19): ribonucleotide unmodified or modified as described for this sequence
caggggcugccgugggggctt

SEQ ID NO: 789 - DNA, 21 bp, Artificial Sequence
  Description of Artificial Sequence: Target Sequence/siNA sense region (stab09)
  misc_feature (1)..(1): 5'-3 attached terminal deoxyabasic moiety, inverted abasic, inverted nucleotide or other terminal cap that is optionally present
  misc_feature (21)..(21): 3'-3 attached terminal deoxyabasic moiety, inverted abasic, inverted nucleotide or other terminal cap that is optionally present
  misc_feature (1)..(19): ribonucleotide unmodified or modified as described for this sequence
gcccccacggcagccccugtt

SEQ ID NO: 790 - DNA, 21 bp, Artificial Sequence
  Description of Artificial Sequence: Target Sequence/siNA antisense region (stab10)
  misc_feature (20)..(20): Phosphorothioate or Phosphorodithioate 3'-Internucleotide Linkage (optionally present)
  misc_feature (1). .(19): ribonucleotide unmodified or modified as described for this sequence
caggggcugccgugggggctt

SEQ ID NO: 791 - DNA, 21 bp, Artificial Sequence
  Description of Artificial Sequence: Target Sequence/siNA antisense region (stab19)
  misc_feature (21)..(21): 3'-3 attached terminal deoxyabasic moiety, inverted abasic, inverted nucleotide or other terminal cap that is optionally present
  misc_feature (1)..(1): 2'-deoxy-2'Fluoro
  misc_feature (2)..(6): 2'-O-methyl
  misc_feature (7)..(8): 2'-deoxy-2'Fluoro
  misc_feature (9)..(9): 2'-O-methyl
  misc_feature (10)..(11): 2'-deoxy-2'Fluoro
  misc_feature (12)..(12): 2'-O-methyl
  misc_feature (13)..(13): 2'-deoxy-2'Fluoro
  misc_feature (14)..(18): 2'-O-methyl
  misc_feature (19)..(19): 2'-deoxy-2'Fluoro
  misc_feature (1)..(19): ribonucleotide unmodified or modified as described for this sequence
caggggcugccgugggggctt

SEQ ID NO: 792 - DNA, 21 bp, Artificial Sequence
  Description of Artificial Sequence: Target Sequence/siNA antisense region (stab22)
  misc_feature (21)..(21): 3'-3 attached terminal deoxyabasic moiety, inverted abasic, inverted nucleotide or other terminal cap that is optionally present
  misc_feature (20)..(20): Phosphorothioate or Phosphorodithioate 3'-Internucleotide Linkage (optionally present)
  misc_feature (1)..(19): ribonucleotide unmodified or modified as described for this sequence
caggggcugccgugggggctt

SEQ ID NO: 793 - DNA, 21 bp, Artificial Sequence
  Description of Artificial Sequence: Target Sequence/siNA antisense region (stab25)
  misc_feature (4)..(6): 2'-O-methyl
  misc_feature (7)..(8): 2'-deoxy-2'Fluoro
  misc_feature (9)..(9): 2'-O-methyl
  misc_feature (10)..(11): 2'-deoxy-2'Fluoro
  misc_feature (12)..(12): 2'-O-methyl
  misc_feature (13)..(13): 2'-deoxy-2'Fluoro
  misc_feature (14)..(18): 2'-O-methyl
  misc_feature (19)..(19): 2'-deoxy-2'Fluoro
  misc_feature (20)..(20): Phosphorothioate or Phosphorodithioate 3'-Internucleotide Linkage (optionally present)
  misc_feature (1). .(19): ribonucleotide unmodified or modified as described for this sequence
caggggcugccgugggggctt

SEQ ID NO: 794 - RNA, 21 nt, Artificial Sequence
  Description of Artificial Sequence: Target Sequence/siNA antisense region (stab35)
  misc_feature (4)..(6): 2'-O-methyl
  misc_feature (7)..(8): 2'-deoxy-2'Fluoro
  misc_feature (9)..(9): 2'-O-methyl
  misc_feature (10)..(11): 2'-deoxy-2'Fluoro
  misc_feature (12)..(12): 2'-O-methyl
  misc_feature (13)..(13): 2'-deoxy-2'Fluoro
  misc_feature (14)..(18): 2'-O-methyl
  misc_feature (19)..(19): 2'-deoxy-2'Fluoro
  misc_feature (20)..(21): 2'-O-methyl
caggggcugccgugggggcuu

SEQ ID NO: 795 - RNA, 21 nt, Artificial Sequence
  Description of Artificial Sequence: Target Sequence/siNA antisense region (stab36)
  misc_feature (4)..(6): 2'-O-methyl
  misc_feature (7)..(8): 2'-deoxy-2'Fluoro
  misc_feature (9)..(9): 2'-O-methyl
  misc_feature (10)..(11): 2'-deoxy-2'Fluoro
  misc_feature (12)..(12): 2'-O-methyl
  misc_feature (13)..(13): 2'-deoxy-2'Fluoro
  misc_feature (14)..(18): 2'-O-methyl
  misc_feature (19)..(19): 2'-deoxy-2'Fluoro
  misc_feature (20)..(21): 2'-O-methyl
caggggcugccgugggggcag

SEQ ID NO: 796 - RNA, 19 nt, Artificial Sequence
  Description of Artificial Sequence: Target Sequence/siNA sense region
guaacgaccacugugaccu

SEQ ID NO: 797 - RNA, 19 nt, Artificial Sequence
  Description of Artificial Sequence: Target Sequence/siNA antisense region
aggucacaguggucguuac

SEQ ID NO: 798 - DNA, 21 bp, Artificial Sequence
  Description of Artificial Sequence: Target Sequence/siNA sense region (stab00)
  misc_feature (1). .(19): ribonucleotide unmodified or modified as described for this sequence
guaacgaccacugugaccutt

SEQ ID NO: 799 - DNA, 21 bp, Artificial Sequence
  Description of Artificial Sequence: Target Sequence/siNA antisense region (stab00as)
  misc_feature (1). .(19): ribonucleotide unmodified or modified as described for this sequence
aggucacaguggucguuactt

SEQ ID NO: 800 - DNA, 21 bp, Artificial Sequence
  Description of Artificial Sequence: Target Sequence/siNA sense region (stab04)
  misc_feature (1)..(1): 5'-3 attached terminal deoxyabasic moiety, inverted abasic, inverted nucleotide or other terminal cap that is optionally present
  misc_feature (21)..(21): 3'-3 attached terminal deoxyabasic moiety, inverted abasic, inverted nucleotide or other terminal cap that is optionally present
  misc_feature (2)..(2): 2'-deoxy-2'Fluoro
  misc_feature (5)..(5): 2'-deoxy-2'Fluoro
  misc_feature (8)..(9): 2'-deoxy-2'Fluoro
  misc_feature (11)..(12): 2'-deoxy-2'Fluoro
  misc_feature (14)..(14): 2'-deoxy-2'Fluoro
  misc_feature (17)..(19): 2'-deoxy-2'Fluoro
  misc_feature (1). .(19): ribonucleotide unmodified or modified as described for this sequence
guaacgaccacugugaccutt

SEQ ID NO: 801 - DNA, 21 bp, Artificial Sequence
  Description of Artificial Sequence: Target Sequence/siNA antisense region (stab05)
  misc_feature (4)..(5): 2'-deoxy-2'Fluoro
  misc_feature (7)..(7): 2'-deoxy-2'Fluoro
  misc_feature (10)..(10): 2'-deoxy-2'Fluoro
  misc_feature (13)..(14): 2'-deoxy-2'Fluoro
  misc_feature (16)..(17): 2'-deoxy-2'Fluoro
  misc_feature (19)..(19): 2'-deoxy-2'Fluoro
  misc_feature (20)..(20): Phosphorothioate or Phosphorodithioate 3'-Internucleotide Linkage (optionally present)
  misc_feature (1). .(19): ribonucleotide unmodified or modified as described for this sequence
aggucacaguggucguuactt

SEQ ID NO: 802 - DNA, 21 bp, Artificial Sequence
  Description of Artificial Sequence: Target Sequence/siNA sense region (stab07)
  misc_feature (1)..(1): 5'-3 attached terminal deoxyabasic moiety, inverted abasic, inverted nucleotide or other terminal cap that is optionally present
  misc_feature (21)..(21): 3'-3 attached terminal deoxyabasic moiety, inverted abasic, inverted nucleotide or other terminal cap that is optionally present
  misc_feature (2)..(2): 2'-deoxy-2'Fluoro
  misc_feature (5)..(5): 2'-deoxy-2'Fluoro
  misc_feature (8)..(9): 2'-deoxy-2'Fluoro
  misc_feature (11)..(12): 2'-deoxy-2'Fluoro
  misc_feature (14)..(14): 2'-deoxy-2'Fluoro
  misc_feature (17)..(19): 2'-deoxy-2'Fluoro
guaacgaccacugugaccutt

SEQ ID NO: 803 - DNA, 21 bp, Artificial Sequence
  Description of Artificial Sequence: Target Sequence/siNA antisense region (stab08)
  misc_feature (1)..(3): 2'-O-methyl
  misc_feature (4)..(5): 2'-deoxy-2'Fluoro
  misc_feature (6)..(6): 2'-O-methyl
  misc_feature (7)..(7): 2'-deoxy-2'Fluoro
  misc_feature (8)..(9): 2'-O-methyl
  misc_feature (10)..(10): 2'-deoxy-2'Fluoro
  misc_feature (11)..(12): 2'-O-methyl
  misc_feature (13)..(14): 2'-deoxy-2'Fluoro
  misc_feature (15)..(15): 2'-O-methyl
  misc_feature (16)..(17): 2'-deoxy-2'Fluoro
  misc_feature (18)..(18): 2'-O-methyl
  misc_feature (19)..(19): 2'-deoxy-2'Fluoro
  misc_feature (20)..(20): Phosphorothioate or Phosphorodithioate 3'-Internucleotide Linkage (optionally present)
  misc_feature (1)..(19): ribonucleotide unmodified or modified as described for this sequence
aggucacaguggucguuactt

SEQ ID NO: 804 - DNA, 21 bp, Artificial Sequence
  Description of Artificial Sequence: Target Sequence/siNA sense region (stab09)
  misc_feature (1)..(1): 5'-3 attached terminal deoxyabasic moiety, inverted abasic, inverted nucleotide or other terminal cap that is optionally present
  misc_feature (21)..(21): 3'-3 attached terminal deoxyabasic moiety, inverted abasic, inverted nucleotide or other terminal cap that is optionally present
  misc_feature (1)..(19): ribonucleotide unmodified or modified as described for this sequence
guaacgaccacugugaccutt

SEQ ID NO: 805 - DNA, 21 bp, Artificial Sequence
  Description of Artificial Sequence: Target Sequence/siNA antisense region (stab10)
  misc_feature (20)..(20): Phosphorothioate or Phosphorodithioate 3'-Internucleotide Linkage (optionally present)
  misc_feature (1)..(19): ribonucleotide unmodified or modified as described for this sequence
aggucacaguggucguuactt

SEQ ID NO: 806 - DNA, 21 bp, Artificial Sequence
  Description of Artificial Sequence: Target Sequence/siNA antisense region (stab19)
  misc_feature (21)..(21): 3'-3 attached terminal deoxyabasic moiety, inverted abasic, inverted nucleotide or other terminal cap that is optionally present
  misc_feature (1)..(3): 2'-O-methyl
  misc_feature (4)..(5): 2'-deoxy-2'Fluoro
  misc_feature (6)..(6): 2'-O-methyl
  misc_feature (7)..(7): 2'-deoxy-2'Fluoro
  misc_feature (8)..(9): 2'-O-methyl
  misc_feature (10)..(10): 2'-deoxy-2'Fluoro
  misc_feature (11)..(12): 2'-O-methyl
  misc_feature (13)..(14): 2'-deoxy-2'Fluoro
  misc_feature (15)..(15): 2'-O-methyl
  misc_feature (16)..(17): 2'-deoxy-2'Fluoro
  misc_feature (18)..(18): 2'-O-methyl
  misc_feature (19)..(19): 2'-deoxy-2'Fluoro
  misc_feature (1)..(19): ribonucleotide unmodified or modified as described for this sequence
aggucacaguggucguuactt

SEQ ID NO: 807 - DNA, 21 bp, Artificial Sequence
  Description of Artificial Sequence: Target Sequence/siNA antisense region (stab22)
  misc_feature (21)..(21): 3'-3 attached terminal deoxyabasic moiety, inverted abasic, inverted nucleotide or other terminal cap that is optionally present
  misc_feature (20)..(20): Phosphorothioate or Phosphorodithioate 3'-Internucleotide Linkage (optionally present)
  misc_feature (1)..(19): ribonucleotide unmodified or modified as described for this sequence
aggucacaguggucguuactt

SEQ ID NO: 808 - DNA, 21 bp, Artificial Sequence
  Description of Artificial Sequence: Target Sequence/siNA antisense region (stab25)
  misc_feature (4)..(5): 2'-deoxy-2'Fluoro
  misc_feature (6)..(6): 2'-O-methyl
  misc_feature (7)..(7): 2'-deoxy-2'Fluoro
  misc_feature (8)..(9): 2'-O-methyl
  misc_feature (10)..(10): 2'-deoxy-2'Fluoro
  misc_feature (11)..(12): 2'-O-methyl
  misc_feature (13)..(14): 2'-deoxy-2'Fluoro
  misc_feature (15)..(15): 2'-O-methyl
  misc_feature (16)..(17): 2'-deoxy-2'Fluoro
  misc_feature (18)..(18): 2'-O-methyl
  misc_feature (19)..(19): 2'-deoxy-2'Fluoro
  misc_feature (20)..(20): Phosphorothioate or Phosphorodithioate 3'-Internucleotide Linkage (optionally present)
  misc_feature (1). .(19): ribonucleotide unmodified or modified as described for this sequence
aggucacaguggucguuactt

SEQ ID NO: 809 - RNA, 21 nt, Artificial Sequence
  Description of Artificial Sequence: Target Sequence/siNA antisense region (stab35)
  misc_feature (4)..(5): 2'-deoxy-2'Fluoro
  misc_feature (6)..(6): 2'-O-methyl
  misc_feature (7)..(7): 2'-deoxy-2'Fluoro
  misc_feature (8)..(9): 2'-O-methyl
  misc_feature (10)..(10): 2'-deoxy-2'Fluoro
  misc_feature (11)..(12): 2'-O-methyl
  misc_feature (13)..(14): 2'-deoxy-2'Fluoro
  misc_feature (15)..(15): 2'-O-methyl
  misc_feature (16)..(17): 2'-deoxy-2'Fluoro
  misc_feature (18)..(18): 2'-O-methyl
  misc_feature (19)..(19): 2'-deoxy-2'Fluoro
  misc_feature (20)..(21): 2'-O-methyl
aggucacaguggucguuacuu

SEQ ID NO: 810 - RNA, 21 nt, Artificial Sequence
  Description of Artificial Sequence: Target Sequence/siNA antisense region (stab36)
  misc_feature (4)..(5): 2'-deoxy-2'Fluoro
  misc_feature (6)..(6): 2'-O-methyl
  misc_feature (7)..(7): 2'-deoxy-2'Fluoro
  misc_feature (8)..(9): 2'-O-methyl
  misc_feature (10)..(10): 2'-deoxy-2'Fluoro
  misc_feature (11)..(12): 2'-O-methyl
  misc_feature (13)..(14): 2'-deoxy-2'Fluoro
  misc_feature (15)..(15): 2'-O-methyl
  misc_feature (16)..(17): 2'-deoxy-2'Fluoro
  misc_feature (18)..(18): 2'-O-methyl
  misc_feature (19)..(19): 2'-deoxy-2'Fluoro
  misc_feature (20)..(21): 2'-O-methyl
aggucacaguggucguuacag

SEQ ID NO: 811 - RNA, 19 nt, Artificial Sequence
  Description of Artificial Sequence: Target Sequence/siNA sense region
ucgcagauccagcaggucc

SEQ ID NO: 812 - RNA, 19 nt, Artificial Sequence
  Description of Artificial Sequence: Target Sequence/siNA antisense region
ggaccugcuggaucugcga

SEQ ID NO: 813 - DNA, 21 bp, Artificial Sequence
  Description of Artificial Sequence: Target Sequence/siNA sense region (stab00)
  misc_feature (1)..(19): ribonucleotide unmodified or modified as described for this sequence
ucgcagauccagcaggucctt

SEQ ID NO: 814 - DNA, 21 bp, Artificial Sequence
  Description of Artificial Sequence: Target Sequence/siNA antisense region (stab00as)
  misc_feature (1)..(19): ribonucleotide unmodified or modified as described for this sequence
ggaccugcuggaucugcgatt

SEQ ID NO: 815 - DNA, 21 bp, Artificial Sequence
  Description of Artificial Sequence: Target Sequence/siNA sense region (stab04)
  misc_feature (1)..(1): 5'-3 attached terminal deoxyabasic moiety, inverted abasic, inverted nucleotide or other terminal cap that is optionally present
  misc_feature (21)..(21): 3'-3 attached terminal deoxyabasic moiety, inverted abasic, inverted nucleotide or other terminal cap that is optionally present
  misc_feature (1)..(2): 2'-deoxy-2'Fluoro
  misc_feature (4)..(4): 2'-deoxy-2'Fluoro
  misc_feature (8)..(10): 2'-deoxy-2'Fluoro
  misc_feature (13)..(13): 2'-deoxy-2'Fluoro
  misc_feature (17)..(19): 2'-deoxy-2'Fluoro
  misc_feature (1). .(19): ribonucleotide unmodified or modified as described for this sequence
ucgcagauccagcaggucctt

SEQ ID NO: 816 - DNA, 21 bp, Artificial Sequence
  Description of Artificial Sequence: Target Sequence/siNA antisense region (stab05)
  misc_feature (4)..(6): 2'-deoxy-2'Fluoro
  misc_feature (8)..(9): 2'-deoxy-2'Fluoro
  misc_feature (13)..(15): 2'-deoxy-2'Fluoro
  misc_feature (17)..(17): 2'-deoxy-2'Fluoro
  misc_feature (20)..(20): Phosphorothioate or Phosphorodithioate 3'-Internucleotide Linkage (optionally present)
  misc_feature (1). .(19): ribonucleotide unmodified or modified as described for this sequence
ggaccugcuggaucugcgatt

SEQ ID NO: 817 - DNA, 21 bp, Artificial Sequence
  Description of Artificial Sequence: Target Sequence/siNA sense region (stab07)
  misc_feature (1)..(1): 5'-3 attached terminal deoxyabasic moiety, inverted abasic, inverted nucleotide or other terminal cap that is optionally present
  misc_feature (21)..(21): 3'-3 attached terminal deoxyabasic moiety, inverted abasic, inverted nucleotide or other terminal cap that is optionally present
  misc_feature (1)..(2): 2'-deoxy-2'Fluoro
  misc_feature (4)..(4): 2'-deoxy-2'Fluoro
  misc_feature (8)..(10): 2'-deoxy-2'Fluoro
  misc_feature (13)..(13): 2'-deoxy-2'Fluoro
  misc_feature (17)..(19): 2'-deoxy-2'Fluoro
  misc_feature (1)..(19): ribonucleotide unmodified or modified as described for this sequence
ucgcagauccagcaggucctt

SEQ ID NO: 818 - DNA, 21 bp, Artificial Sequence
  Description of Artificial Sequence: Target Sequence/siNA antisense region (stab08)
  misc_feature (1)..(3): 2'-O-methyl
  misc_feature (4)..(6): 2'-deoxy-2'Fluoro
  misc_feature (7)..(7): 2'-O-methyl
  misc_feature (8)..(9): 2'-deoxy-2'Fluoro
  misc_feature (10)..(12): 2'-O-methyl
  misc_feature (13)..(15): 2'-deoxy-2'Fluoro
  misc_feature (16)..(16): 2'-O-methyl
  misc_feature (17)..(17): 2'-deoxy-2'Fluoro
  misc_feature (18)..(19): 2'-O-methyl
  misc_feature (20)..(20): Phosphorothioate or Phosphorodithioate 3'-Internucleotide Linkage (optionally present)
  misc_feature (1)..(19): ribonucleotide unmodified or modified as described for this sequence
ggaccugcuggaucugcgatt

SEQ ID NO: 819 - DNA, 21 bp, Artificial Sequence
  Description of Artificial Sequence: Target Sequence/siNA sense region (stab09)
  misc_feature (1)..(1): 5'-3 attached terminal deoxyabasic moiety, inverted abasic, inverted nucleotide or other terminal cap that is optionally present
  misc_feature (21)..(21): 3'-3 attached terminal deoxyabasic moiety, inverted abasic, inverted nucleotide or other terminal cap that is optionally present
  misc_feature (1)..(19): ribonucleotide unmodified or modified as described for this sequence
ucgcagauccagcaggucctt

SEQ ID NO: 820 - DNA, 21 bp, Artificial Sequence
  Description of Artificial Sequence: Target Sequence/siNA antisense region (stab10)
  misc_feature (20)..(20): Phosphorothioate or Phosphorodithioate 3'-Internucleotide Linkage (optionally present)
  misc_feature (1)..(19): ribonucleotide unmodified or modified as described for this sequence
ggaccugcuggaucugcgatt

SEQ ID NO: 821 - DNA, 21 bp, Artificial Sequence
  Description of Artificial Sequence: Target Sequence/siNA antisense region (stab19)
  misc_feature (21)..(21): 3'-3 attached terminal deoxyabasic moiety, inverted abasic, inverted nucleotide or other terminal cap that is optionally present
  misc_feature (1)..(3): 2'-O-methyl
  misc_feature (4)..(6): 2'-deoxy-2'Fluoro
  misc_feature (7)..(7): 2'-O-methyl
  misc_feature (8)..(9): 2'-deoxy-2'Fluoro
  misc_feature (10)..(12): 2'-O-methyl
  misc_feature (13)..(15): 2'-deoxy-2'Fluoro
  misc_feature (16)..(16): 2'-O-methyl
  misc_feature (17)..(17): 2'-deoxy-2'Fluoro
  misc_feature (18)..(19): 2'-O-methyl
  misc_feature (1)..(19): ribonucleotide unmodified or modified as described for this sequence
ggaccugcuggaucugcgatt

SEQ ID NO: 822 - DNA, 21 bp, Artificial Sequence
  Description of Artificial Sequence: Target Sequence/siNA antisense region (stab22)
  misc_feature (21)..(21): 3'-3 attached terminal deoxyabasic moiety, inverted abasic, inverted nucleotide or other terminal cap that is optionally present
  misc_feature (20)..(20): Phosphorothioate or Phosphorodithioate 3'-Internucleotide Linkage (optionally present)
  misc_feature (1)..(19): ribonucleotide unmodified or modified as described for this sequence
ggaccugcuggaucugcgatt

SEQ ID NO: 823 - DNA, 21 bp, Artificial Sequence
  Description of Artificial Sequence: Target Sequence/siNA antisense region (stab25)
  misc_feature (4)..(6): 2'-deoxy-2'Fluoro
  misc_feature (7)..(7): 2'-O-methyl
  misc_feature (8)..(9): 2'-deoxy-2'Fluoro
  misc_feature (10)..(12): 2'-O-methyl
  misc_feature (13)..(15): 2'-deoxy-2'Fluoro
  misc_feature (16)..(16): 2'-O-methyl
  misc_feature (17)..(17): 2'-deoxy-2'Fluoro
  misc_feature (18)..(19): 2'-O-methyl
  misc_feature (20)..(20): Phosphorothioate or Phosphorodithioate 3'-Internucleotide Linkage (optionally present)
  misc_feature (1)..(3): ribonucleotide
ggaccugcuggaucugcgatt

SEQ ID NO: 824 - RNA, 21 nt, Artificial Sequence
  Description of Artificial Sequence: Target Sequence/siNA antisense region (stab35)
  misc_feature (4)..(6): 2'-deoxy-2'Fluoro
  misc_feature (7)..(7): 2'-O-methyl
  misc_feature (8)..(9): 2'-deoxy-2'Fluoro
  misc_feature (10)..(12): 2'-O-methyl
  misc_feature (13)..(15): 2'-deoxy-2'Fluoro
  misc_feature (16)..(16): 2'-O-methyl
  misc_feature (17)..(17): 2'-deoxy-2'Fluoro
  misc_feature (18)..(21): 2'-O-methyl
ggaccugcuggaucugcgauu

SEQ ID NO: 825 - RNA, 21 nt, Artificial Sequence
  Description of Artificial Sequence: Target Sequence/siNA antisense region (stab36)
  misc_feature (4)..(6): 2'-deoxy-2'Fluoro
  misc_feature (7)..(7): 2'-O-methyl
  misc_feature (8)..(9): 2'-deoxy-2'Fluoro
  misc_feature (10)..(12): 2'-O-methyl
  misc_feature (13)..(15): 2'-deoxy-2'Fluoro
  misc_feature (16)..(16): 2'-O-methyl
  misc_feature (17)..(17): 2'-deoxy-2'Fluoro
  misc_feature (18)..(21): 2'-O-methyl
ggaccugcuggaucugcgagg

SEQ ID NO: 826 - RNA, 19 nt, Artificial Sequence
  Description of Artificial Sequence: Target Sequence/siNA sense region
ccgguccugcugcagcccc

SEQ ID NO: 827 - RNA, 19 nt, Artificial Sequence
  Description of Artificial Sequence: Target Sequence/siNA antisense region
ggggcugcagcaggaccgg

SEQ ID NO: 828 - DNA, 21 bp, Artificial Sequence
  Description of Artificial Sequence: Target Sequence/siNA sense region (stab00)
  misc_feature (1)..(19): ribonucleotide unmodified or modified as described for this sequence
ccgguccugcugcagcccctt

SEQ ID NO: 829 - DNA, 21 bp, Artificial Sequence
  Description of Artificial Sequence: Target Sequence/siNA antisense region (stab00as)
  misc_feature (1). .(19): ribonucleotide unmodified or modified as described for this sequence
ggggcugcagcaggaccggtt

SEQ ID NO: 830 - DNA, 21 bp, Artificial Sequence
  Description of Artificial Sequence: Target Sequence/siNA sense region (stab04)
  misc_feature (1)..(1): 5'-3 attached terminal deoxyabasic moiety, inverted abasic, inverted nucleotide or other terminal cap that is optionally present
  misc_feature (21)..(21): 3'-3 attached terminal deoxyabasic moiety, inverted abasic, inverted nucleotide or other terminal cap that is optionally present
  misc_feature (1)..(2): 2'-deoxy-2'Fluoro
  misc_feature (5)..(8): 2'-deoxy-2'Fluoro
  misc_feature (10)..(11): 2'-deoxy-2'Fluoro
  misc_feature (13)..(13): 2'-deoxy-2'Fluoro
  misc_feature (16)..(19): 2'-deoxy-2'Fluoro
  misc_feature (1). .(19): ribonucleotide unmodified or modified as described for this sequence
ccgguccugcugcagcccctt

SEQ ID NO: 831 - DNA, 21 bp, Artificial Sequence
  Description of Artificial Sequence: Target Sequence/siNA antisense region (stab05)
  misc_feature (5)..(6): 2'-deoxy-2'Fluoro
  misc_feature (8)..(8): 2'-deoxy-2'Fluoro
  misc_feature (11)..(11): 2'-deoxy-2'Fluoro
  misc_feature (16)..(17): 2'-deoxy-2'Fluoro
  misc_feature (20)..(20): Phosphorothioate or Phosphorodithioate 3'-Internucleotide Linkage (optionally present)
  misc_feature (1). .(19): ribonucleotide unmodified or modified as described for this sequence
ggggcugcagcaggaccggtt

SEQ ID NO: 832 - DNA, 21 bp, Artificial Sequence
  Description of Artificial Sequence: Target Sequence/siNA sense region (stab07)
  misc_feature (1)..(1): 5'-3 attached terminal deoxyabasic moiety, inverted abasic, inverted nucleotide or other terminal cap that is optionally present
  misc_feature (21)..(21): 3'-3 attached terminal deoxyabasic moiety, inverted abasic, inverted nucleotide or other terminal cap that is optionally present
  misc_feature (1)..(2): 2'-deoxy-2'Fluoro
  misc_feature (5)..(8): 2'-deoxy-2'Fluoro
  misc_feature (10)..(11): 2'-deoxy-2'Fluoro
  misc_feature (13)..(13): 2'-deoxy-2'Fluoro
  misc_feature (16)..(19): 2'-deoxy-2'Fluoro
  misc_feature (1)..(19): ribonucleotide unmodified or modified as described for this sequence
ccgguccugcugcagcccctt

SEQ ID NO: 833 - DNA, 21 bp, Artificial Sequence
  Description of Artificial Sequence: Target Sequence/siNA antisense region (stab08)
  misc_feature (1)..(4): 2'-O-methyl
  misc_feature (5)..(6): 2'-deoxy-2'Fluoro
  misc_feature (7)..(7): 2'-O-methyl
  misc_feature (8)..(8): 2'-deoxy-2'Fluoro
  misc_feature (9)..(10): 2'-O-methyl
  misc_feature (11)..(11): 2'-deoxy-2'Fluoro
  misc_feature (12)..(15): 2'-O-methyl
  misc_feature (16)..(17): 2'-deoxy-2'Fluoro
  misc_feature (18)..(19): 2'-O-methyl
  misc_feature (20)..(20): Phosphorothioate or Phosphorodithioate 3'-Internucleotide Linkage (optionally present)
  misc_feature (1)..(19): ribonucleotide unmodified or modified as described for this sequence
ggggcugcagcaggaccggtt

SEQ ID NO: 834 - DNA, 21 bp, Artificial Sequence
  Description of Artificial Sequence: Target Sequence/siNA sense region (stab09)
  misc_feature (1)..(1): 5'-3 attached terminal deoxyabasic moiety, inverted abasic, inverted nucleotide or other terminal cap that is optionally present
  misc_feature (21)..(21): 3'-3 attached terminal deoxyabasic moiety, inverted abasic, inverted nucleotide or other terminal cap that is optionally present
  misc_feature (1)..(19): ribonucleotide unmodified or modified as described for this sequence
ccgguccugcugcagcccctt

SEQ ID NO: 835 - DNA, 21 bp, Artificial Sequence
  Description of Artificial Sequence: Target Sequence/siNA antisense region (stab10)
  misc_feature (20)..(20): Phosphorothioate or Phosphorodithioate 3'-Internucleotide Linkage (optionally present)
  misc_feature (1)..(19): ribonucleotide unmodified or modified as described for this sequence
ggggcugcagcaggaccggtt

SEQ ID NO: 836 - DNA, 21 bp, Artificial Sequence
  Description of Artificial Sequence: Target Sequence/siNA antisense region (stab19)
  misc_feature (21)..(21): 3'-3 attached terminal deoxyabasic moiety, inverted abasic, inverted nucleotide or other terminal cap that is optionally present
  misc_feature (1)..(4): 2'-O-methyl
  misc_feature (5)..(6): 2'-deoxy-2'Fluoro
  misc_feature (7)..(7): 2'-O-methyl
  misc_feature (8)..(8): 2'-deoxy-2'Fluoro
  misc_feature (9)..(10): 2'-O-methyl
  misc_feature (11)..(11): 2'-deoxy-2'Fluoro
  misc_feature (12)..(15): 2'-O-methyl
  misc_feature (16)..(17): 2'-deoxy-2'Fluoro
  misc_feature (18)..(19): 2'-O-methyl
  misc_feature (1)..(19): ribonucleotide unmodified or modified as described for this sequence
ggggcugcagcaggaccggtt

SEQ ID NO: 837 - DNA, 21 bp, Artificial Sequence
  Description of Artificial Sequence: Target Sequence/siNA antisense region (stab22)
  misc_feature (21)..(21): 3'-3 attached terminal deoxyabasic moiety, inverted abasic, inverted nucleotide or other terminal cap that is optionally present
  misc_feature (20)..(20): Phosphorothioate or Phosphorodithioate 3'-Internucleotide Linkage (optionally present)
  misc_feature (1)..(19): ribonucleotide unmodified or modified as described for this sequence
ggggcugcagcaggaccggtt

SEQ ID NO: 838 - DNA, 21 bp, Artificial Sequence
  Description of Artificial Sequence: Target Sequence/siNA antisense region (stab25)
  misc_feature (4)..(4): 2'-O-methyl
  misc_feature (5)..(6): 2'-deoxy-2'Fluoro
  misc_feature (7)..(7): 2'-O-methyl
  misc_feature (8)..(8): 2'-deoxy-2'Fluoro
  misc_feature (9)..(10): 2'-O-methyl
  misc_feature (11)..(11): 2'-deoxy-2'Fluoro
  misc_feature (12)..(15): 2'-O-methyl
  misc_feature (16)..(17): 2'-deoxy-2'Fluoro
  misc_feature (18)..(19): 2'-O-methyl
  misc_feature (20)..(20): Phosphorothioate or Phosphorodithioate 3'-Internucleotide Linkage (optionally present)
  misc_feature (1). .(19): ribonucleotide unmodified or modified as described for this sequence
ggggcugcagcaggaccggtt

SEQ ID NO: 839 - RNA, 21 nt, Artificial Sequence
  Description of Artificial Sequence: Target Sequence/siNA antisense region (stab35)
  misc_feature (4)..(4): 2'-O-methyl
  misc_feature (5)..(6): 2'-deoxy-2'Fluoro
  misc_feature (7)..(7): 2'-O-methyl
  misc_feature (8)..(8): 2'-deoxy-2'Fluoro
  misc_feature (9)..(10): 2'-O-methyl
  misc_feature (11)..(11): 2'-deoxy-2'Fluoro
  misc_feature (12)..(15): 2'-O-methyl
  misc_feature (16)..(17): 2'-deoxy-2'Fluoro
  misc_feature (18)..(21): 2'-O-methyl
ggggcugcagcaggaccgguu

SEQ ID NO: 840 - RNA, 21 nt, Artificial Sequence
  Description of Artificial Sequence: Target Sequence/siNA antisense region (stab36)
  misc_feature (4)..(4): 2'-O-methyl
  misc_feature (5)..(6): 2'-deoxy-2'Fluoro
  misc_feature (7)..(7): 2'-O-methyl
  misc_feature (8)..(8): 2'-deoxy-2'Fluoro
  misc_feature (9)..(10): 2'-O-methyl
  misc_feature (11)..(11): 2'-deoxy-2'Fluoro
  misc_feature (12)..(15): 2'-O-methyl
  misc_feature (16)..(17): 2'-deoxy-2'Fluoro
  misc_feature (18)..(21): 2'-O-methyl
ggggcugcagcaggaccggga

SEQ ID NO: 841 - RNA, 19 nt, Artificial Sequence
  Description of Artificial Sequence: Target Sequence/siNA sense region
cacuucaucaaggcagacu

SEQ ID NO: 842 - RNA, 19 nt, Artificial Sequence
  Description of Artificial Sequence: Target Sequence/siNA antisense region
agucugccuugaugaagug

SEQ ID NO: 843 - DNA, 21 bp, Artificial Sequence
  Description of Artificial Sequence: Target Sequence/siNA sense region (stab00)
  misc_feature (1)..(19): ribonucleotide unmodified or modified as described for this sequence
cacuucaucaaggcagacutt

SEQ ID NO: 844 - DNA, 21 bp, Artificial Sequence
  Description of Artificial Sequence: Target Sequence/siNA antisense region (stab00as)
  misc_feature (1)..(19): ribonucleotide unmodified or modified as described for this sequence
agucugccuugaugaagugtt

SEQ ID NO: 845 - DNA, 21 bp, Artificial Sequence
  Description of Artificial Sequence: Target Sequence/siNA sense region (stab04)
  misc_feature (1)..(1): 5'-3 attached terminal deoxyabasic moiety, inverted abasic, inverted nucleotide or other terminal cap that is optionally present
  misc_feature (21)..(21): 3'-3 attached terminal deoxyabasic moiety, inverted abasic, inverted nucleotide or other terminal cap that is optionally present
  misc_feature (1)..(1): 2'-deoxy-2'Fluoro
  misc_feature (3)..(6): 2'-deoxy-2'Fluoro
  misc_feature (8)..(9): 2'-deoxy-2'Fluoro
  misc_feature (14)..(14): 2'-deoxy-2'Fluoro
  misc_feature (18)..(19): 2'-deoxy-2'Fluoro
  misc_feature (1). .(19): ribonucleotide unmodified or modified as described for this sequence
cacuucaucaaggcagacutt

SEQ ID NO: 846 - DNA, 21 bp, Artificial Sequence
  Description of Artificial Sequence: Target Sequence/siNA antisense region (stab05)
  misc_feature (3)..(5): 2'-deoxy-2'Fluoro
  misc_feature (7)..(10): 2'-deoxy-2'Fluoro
  misc_feature (13)..(13): 2'-deoxy-2'Fluoro
  misc_feature (18)..(18): 2'-deoxy-2'Fluoro
  misc_feature (20)..(20): Phosphorothioate or Phosphorodithioate 3'-Internucleotide Linkage (optionally present)
  misc_feature (1). .(19): ribonucleotide unmodified or modified as described for this sequence
agucugccuugaugaagugtt

SEQ ID NO: 847 - DNA, 21 bp, Artificial Sequence
  Description of Artificial Sequence: Target Sequence/siNA sense region (stab07)
  misc_feature (1)..(1): 5'-3 attached terminal deoxyabasic moiety, inverted abasic, inverted nucleotide or other terminal cap that is optionally present
  misc_feature (21)..(21): 3'-3 attached terminal deoxyabasic moiety, inverted abasic, inverted nucleotide or other terminal cap that is optionally present
  misc_feature (1)..(1): 2'-deoxy-2'Fluoro
  misc_feature (3)..(6): 2'-deoxy-2'Fluoro
  misc_feature (8)..(9): 2'-deoxy-2'Fluoro
  misc_feature (14)..(14): 2'-deoxy-2'Fluoro
  misc_feature (18)..(19): 2'-deoxy-2'Fluoro
  misc_feature (1)..(19): ribonucleotide unmodified or modified as described for this sequence
cacuucaucaaggcagacutt

SEQ ID NO: 848 - DNA, 21 bp, Artificial Sequence
  Description of Artificial Sequence: Target Sequence/siNA antisense region (stab08)
  misc_feature (1)..(2): 2'-O-methyl
  misc_feature (3)..(5): 2'-deoxy-2'Fluoro
  misc_feature (6)..(6): 2'-O-methyl
  misc_feature (7)..(10): 2'-deoxy-2'Fluoro
  misc_feature (11)..(12): 2'-O-methyl
  misc_feature (13)..(13): 2'-deoxy-2'Fluoro
  misc_feature (14)..(17): 2'-O-methyl
  misc_feature (18)..(18): 2'-deoxy-2'Fluoro
  misc_feature (19)..(19): 2'-O-methyl
  misc_feature (20)..(20): Phosphorothioate or Phosphorodithioate 3'-Internucleotide Linkage (optionally present)
  misc_feature (1)..(19): ribonucleotide unmodified or modified as described for this sequence
agucugccuugaugaagugtt

SEQ ID NO: 849 - DNA, 21 bp, Artificial Sequence
  Description of Artificial Sequence: Target Sequence/siNA sense region (stab09)
  misc_feature (1)..(1): 5'-3 attached terminal deoxyabasic moiety, inverted abasic, inverted nucleotide or other terminal cap that is optionally present
  misc_feature (21)..(21): 3'-3 attached terminal deoxyabasic moiety, inverted abasic, inverted nucleotide or other terminal cap that is optionally present
  misc_feature (1)..(19): ribonucleotide unmodified or modified as described for this sequence
cacuucaucaaggcagacutt

SEQ ID NO: 850 - DNA, 21 bp, Artificial Sequence
  Description of Artificial Sequence: Target Sequence/siNA antisense region (stab10)
  misc_feature (20)..(20): Phosphorothioate or Phosphorodithioate 3'-Internucleotide Linkage (optionally present)
  misc_feature (1)..(19): ribonucleotide unmodified or modified as described for this sequence
agucugccuugaugaagugtt

SEQ ID NO: 851 - DNA, 21 bp, Artificial Sequence
  Description of Artificial Sequence: Target Sequence/siNA antisense region (stab19)
  misc_feature (21)..(21): 3'-3 attached terminal deoxyabasic moiety, inverted abasic, inverted nucleotide or other terminal cap that is optionally present
  misc_feature (1)..(2): 2'-O-methyl
  misc_feature (3)..(5): 2'-deoxy-2'Fluoro
  misc_feature (6)..(6): 2'-O-methyl
  misc_feature (7)..(10): 2'-deoxy-2'Fluoro
  misc_feature (11)..(12): 2'-O-methyl
  misc_feature (13)..(13): 2'-deoxy-2'Fluoro
  misc_feature (14)..(17): 2'-O-methyl
  misc_feature (18)..(18): 2'-deoxy-2'Fluoro
  misc_feature (19)..(19): 2'-O-methyl
  misc_feature (1)..(19): ribonucleotide unmodified or modified as described for this sequence
agucugccuugaugaagugtt

SEQ ID NO: 852 - DNA, 21 bp, Artificial Sequence
  Description of Artificial Sequence: Target Sequence/siNA antisense region (stab22)
  misc_feature (21)..(21): 3'-3 attached terminal deoxyabasic moiety, inverted abasic, inverted nucleotide or other terminal cap that is optionally present
  misc_feature (20)..(20): Phosphorothioate or Phosphorodithioate 3'-Internucleotide Linkage (optionally present)
  misc_feature (1)..(19): ribonucleotide unmodified or modified as described for this sequence
agucugccuugaugaagugtt

SEQ ID NO: 853 - DNA, 21 bp, Artificial Sequence
  Description of Artificial Sequence: Target Sequence/siNA antisense region (stab25)
  misc_feature (4)..(5): 2'-deoxy-2'Fluoro
  misc_feature (6)..(6): 2'-O-methyl
  misc_feature (7)..(10): 2'-deoxy-2'Fluoro
  misc_feature (11)..(12): 2'-O-methyl
  misc_feature (13)..(13): 2'-deoxy-2'Fluoro
  misc_feature (14)..(17): 2'-O-methyl
  misc_feature (18)..(18): 2'-deoxy-2'Fluoro
  misc_feature (19)..(19): 2'-O-methyl
  misc_feature (20)..(20): Phosphorothioate or Phosphorodithioate 3'-Internucleotide Linkage (optionally present)
  misc_feature (1). .(19): ribonucleotide unmodified or modified as described for this sequence
agucugccuugaugaagugtt

SEQ ID NO: 854 - RNA, 21 nt, Artificial Sequence
  Description of Artificial Sequence: Target Sequence/siNA antisense region (stab35)
  misc_feature (4)..(5): 2'-deoxy-2'Fluoro
  misc_feature (6)..(6): 2'-O-methyl
  misc_feature (7)..(10): 2'-deoxy-2'Fluoro
  misc_feature (11)..(12): 2'-O-methyl
  misc_feature (13)..(13): 2'-deoxy-2'Fluoro
  misc_feature (14)..(17): 2'-O-methyl
  misc_feature (18)..(18): 2'-deoxy-2'Fluoro
  misc_feature (19)..(21): 2'-O-methyl
agucugccuugaugaaguguu

SEQ ID NO: 855 - RNA, 21 nt, Artificial Sequence
  Description of Artificial Sequence: Target Sequence/siNA antisense region (stab36)
  misc_feature (4)..(5): 2'-deoxy-2'Fluoro
  misc_feature (6)..(6): 2'-O-methyl
  misc_feature (7)..(10): 2'-deoxy-2'Fluoro
  misc_feature (11)..(12): 2'-O-methyl
  misc_feature (13)..(13): 2'-deoxy-2'Fluoro
  misc_feature (14)..(17): 2'-O-methyl
  misc_feature (18)..(18): 2'-deoxy-2'Fluoro
  misc_feature (19)..(21): 2'-O-methyl
agucugccuugaugaaguggg

SEQ ID NO: 856 - RNA, 19 nt, Artificial Sequence
  Description of Artificial Sequence: Target Sequence/siNA sense region
ucgcugcuucugacagcca

SEQ ID NO: 857 - RNA, 19 nt, Artificial Sequence
  Description of Artificial Sequence: Target Sequence/siNA antisense region
uggcugucagaagcagcga

SEQ ID NO: 858 - DNA, 21 bp, Artificial Sequence
  Description of Artificial Sequence: Target Sequence/siNA sense region (stab00)
  misc_feature (1)..(19): ribonucleotide unmodified or modified as described for this sequence
ucgcugcuucugacagccatt

SEQ ID NO: 859 - DNA, 21 bp, Artificial Sequence
  Description of Artificial Sequence: Target Sequence/siNA antisense region (stab00as)
  misc_feature (1)..(19): ribonucleotide unmodified or modified as described for this sequence
uggcugucagaagcagcgatt

SEQ ID NO: 860 - DNA, 21 bp, Artificial Sequence
  Description of Artificial Sequence: Target Sequence/siNA sense region (stab04)
  misc_feature (1)..(1): 5'-3 attached terminal deoxyabasic moiety, inverted abasic, inverted nucleotide or other terminal cap that is optionally present
  misc_feature (21)..(21): 3'-3 attached terminal deoxyabasic moiety, inverted abasic, inverted nucleotide or other terminal cap that is optionally present
  misc_feature (1)..(2): 2'-deoxy-2'Fluoro
  misc_feature (4)..(5): 2'-deoxy-2'Fluoro
  misc_feature (7)..(11): 2'-deoxy-2'Fluoro
  misc_feature (14)..(14): 2'-deoxy-2'Fluoro
  misc_feature (17)..(18): 2'-deoxy-2'Fluoro
  misc_feature (1). .(19): ribonucleotide unmodified or modified as described for this sequence
ucgcugcuucugacagccatt

SEQ ID NO: 861 - DNA, 21 bp, Artificial Sequence
  Description of Artificial Sequence: Target Sequence/siNA antisense region (stab05)
  misc_feature (1)..(1): 2'-deoxy-2'Fluoro
  misc_feature (4)..(5): 2'-deoxy-2'Fluoro
  misc_feature (7)..(8): 2'-deoxy-2'Fluoro
  misc_feature (14)..(14): 2'-deoxy-2'Fluoro
  misc_feature (17)..(17): 2'-deoxy-2'Fluoro
  misc_feature (20)..(20): Phosphorothioate or Phosphorodithioate 3'-Internucleotide Linkage (optionally present)
  misc_feature (1). .(19): ribonucleotide unmodified or modified as described for this sequence
uggcugucagaagcagcgatt

SEQ ID NO: 862 - DNA, 21 bp, Artificial Sequence
  Description of Artificial Sequence: Target Sequence/siNA sense region (stab07)
  misc_feature (1)..(1): 5'-3 attached terminal deoxyabasic moiety, inverted abasic, inverted nucleotide or other terminal cap that is optionally present
  misc_feature (21)..(21): 3'-3 attached terminal deoxyabasic moiety, inverted abasic, inverted nucleotide or other terminal cap that is optionally present
  misc_feature (1)..(2): 2'-deoxy-2'Fluoro
  misc_feature (4)..(5): 2'-deoxy-2'Fluoro
  misc_feature (7)..(11): 2'-deoxy-2'Fluoro
  misc_feature (14)..(14): 2'-deoxy-2'Fluoro
  misc_feature (17)..(18): 2'-deoxy-2'Fluoro
  misc_feature (1)..(19): ribonucleotide unmodified or modified as described for this sequence
ucgcugcuucugacagccatt

SEQ ID NO: 863 - DNA, 21 bp, Artificial Sequence
  Description of Artificial Sequence: Target Sequence/siNA antisense region (stab08)
  misc_feature (1)..(1): 2'-deoxy-2'Fluoro
  misc_feature (2)..(3): 2'-O-methyl
  misc_feature (4)..(5): 2'-deoxy-2'Fluoro
  misc_feature (6)..(6): 2'-O-methyl
  misc_feature (7)..(8): 2'-deoxy-2'Fluoro
  misc_feature (9)..(13): 2'-O-methyl
  misc_feature (14)..(14): 2'-deoxy-2'Fluoro
  misc_feature (15)..(16): 2'-O-methyl
  misc_feature (17)..(17): 2'-deoxy-2'Fluoro
  misc_feature (18)..(19): 2'-O-methyl
  misc_feature (20)..(20): Phosphorothioate or Phosphorodithioate 3'-Internucleotide Linkage (optionally present)
  misc_feature (1)..(19): ribonucleotide unmodified or modified as described for this sequence
uggcugucagaagcagcgatt

SEQ ID NO: 864 - DNA, 21 bp, Artificial Sequence
  Description of Artificial Sequence: Target Sequence/siNA sense region (stab09)
  misc_feature (1)..(1): 5'-3 attached terminal deoxyabasic moiety, inverted abasic, inverted nucleotide or other terminal cap that is optionally present
  misc_feature (21)..(21): 3'-3 attached terminal deoxyabasic moiety, inverted abasic, inverted nucleotide or other terminal cap that is optionally present
  misc_feature (1)..(19): ribonucleotide unmodified or modified as described for this sequence
ucgcugcuucugacagccatt

SEQ ID NO: 865 - DNA, 21 bp, Artificial Sequence
  Description of Artificial Sequence: Target Sequence/siNA antisense region (stab10)
  misc_feature (20)..(20): Phosphorothioate or Phosphorodithioate 3'-Internucleotide Linkage (optionally present)
  misc_feature (1)..(19): ribonucleotide unmodified or modified as described for this sequence
uggcugucagaagcagcgatt

SEQ ID NO: 866 - DNA, 21 bp, Artificial Sequence
  Description of Artificial Sequence: Target Sequence/siNA antisense region (stab19)
  misc_feature (21)..(21): 3'-3 attached terminal deoxyabasic moiety, inverted abasic, inverted nucleotide or other terminal cap that is optionally present
  misc_feature (1)..(1): 2'-deoxy-2'Fluoro
  misc_feature (2)..(3): 2'-O-methyl
  misc_feature (4)..(5): 2'-deoxy-2'Fluoro
  misc_feature (6)..(6): 2'-O-methyl
  misc_feature (7)..(8): 2'-deoxy-2'Fluoro
  misc_feature (9)..(13): 2'-O-methyl
  misc_feature (14)..(14): 2'-deoxy-2'Fluoro
  misc_feature (15)..(16): 2'-O-methyl
  misc_feature (17)..(17): 2'-deoxy-2'Fluoro
  misc_feature (18)..(19): 2'-O-methyl
  misc_feature (1)..(19): ribonucleotide unmodified or modified as described for this sequence
uggcugucagaagcagcgatt

SEQ ID NO: 867 - DNA, 21 bp, Artificial Sequence
  Description of Artificial Sequence: Target Sequence/siNA antisense region (stab22)
  misc_feature (21)..(21): 3'-3 attached terminal deoxyabasic moiety, inverted abasic, inverted nucleotide or other terminal cap that is optionally present
  misc_feature (20)..(20): Phosphorothioate or Phosphorodithioate 3'-Internucleotide Linkage (optionally present)
  misc_feature (1)..(19): ribonucleotide unmodified or modified as described for this sequence
uggcugucagaagcagcgatt

SEQ ID NO: 868 - DNA, 21 bp, Artificial Sequence
  Description of Artificial Sequence: Target Sequence/siNA antisense region (stab25)
  misc_feature (4)..(5): 2'-deoxy-2'Fluoro
  misc_feature (6)..(6): 2'-O-methyl
  misc_feature (7)..(8): 2'-deoxy-2'Fluoro
  misc_feature (9)..(13): 2'-O-methyl
  misc_feature (14)..(14): 2'-deoxy-2'Fluoro
  misc_feature (15)..(16): 2'-O-methyl
  misc_feature (17)..(17): 2'-deoxy-2'Fluoro
  misc_feature (18)..(19): 2'-O-methyl
  misc_feature (20)..(20): Phosphorothioate or Phosphorodithioate 3'-Internucleotide Linkage (optionally present)
  misc_feature (1). .(19): ribonucleotide unmodified or modified as described for this sequence
uggcugucagaagcagcgatt

SEQ ID NO: 869 - RNA, 21 nt, Artificial Sequence
  Description of Artificial Sequence: Target Sequence/siNA antisense region (stab35)
  misc_feature (4)..(5): 2'-deoxy-2'Fluoro
  misc_feature (6)..(6): 2'-O-methyl
  misc_feature (7)..(8): 2'-deoxy-2'Fluoro
  misc_feature (9)..(13): 2'-O-methyl
  misc_feature (14)..(14): 2'-deoxy-2'Fluoro
  misc_feature (15)..(16): 2'-O-methyl
  misc_feature (17)..(17): 2'-deoxy-2'Fluoro
  misc_feature (18)..(21): 2'-O-methyl
uggcugucagaagcagcgauu

SEQ ID NO: 870 - RNA, 21 nt, Artificial Sequence
  Description of Artificial Sequence: Target Sequence/siNA antisense region (stab36)
  misc_feature (4)..(5): 2'-deoxy-2'Fluoro
  misc_feature (6)..(6): 2'-O-methyl
  misc_feature (7)..(8): 2'-deoxy-2'Fluoro
  misc_feature (9)..(13): 2'-O-methyl
  misc_feature (14)..(14): 2'-deoxy-2'Fluoro
  misc_feature (15)..(16): 2'-O-methyl
  misc_feature (17)..(17): 2'-deoxy-2'Fluoro
  misc_feature (18)..(21): 2'-O-methyl
uggcugucagaagcagcgagu

SEQ ID NO: 871 - RNA, 19 nt, Artificial Sequence
  Description of Artificial Sequence: Target Sequence/siNA sense region
augaagacagacggagcca

SEQ ID NO: 872 - RNA, 19 nt, Artificial Sequence
  Description of Artificial Sequence: Target Sequence/siNA antisense region
uggcuccgucugucuucau

SEQ ID NO: 873 - DNA, 21 bp, Artificial Sequence
  Description of Artificial Sequence: Target Sequence/siNA sense region (stab00)
  misc_feature (1)..(19): ribonucleotide unmodified or modified as described for this sequence
augaagacagacggagccatt

SEQ ID NO: 874 - DNA, 21 bp, Artificial Sequence
  Description of Artificial Sequence: Target Sequence/siNA antisense region (stab00as)
  misc_feature (1)..(19): ribonucleotide unmodified or modified as described for this sequence
uggcuccgucugucuucautt

SEQ ID NO: 875 - DNA, 21 bp, Artificial Sequence
  Description of Artificial Sequence: Target Sequence/siNA sense region (stab04)
  misc_feature (1)..(1): 5'-3 attached terminal deoxyabasic moiety, inverted abasic, inverted nucleotide or other terminal cap that is optionally present
  misc_feature (21)..(21): 3'-3 attached terminal deoxyabasic moiety, inverted abasic, inverted nucleotide or other terminal cap that is optionally present
  misc_feature (2)..(2): 2'-deoxy-2'Fluoro
  misc_feature (8)..(8): 2'-deoxy-2'Fluoro
  misc_feature (12)..(12): 2'-deoxy-2'Fluoro
  misc_feature (17)..(18): 2'-deoxy-2'Fluoro
  misc_feature (1). .(19): ribonucleotide unmodified or modified as described for this sequence
augaagacagacggagccatt

SEQ ID NO: 876 - DNA, 21 bp, Artificial Sequence
  Description of Artificial Sequence: Target Sequence/siNA antisense region (stab05)
  misc_feature (1)..(1): 2'-deoxy-2'Fluoro
  misc_feature (4)..(7): 2'-deoxy-2'Fluoro
  misc_feature (9)..(11): 2'-deoxy-2'Fluoro
  misc_feature (13)..(17): 2'-deoxy-2'Fluoro
  misc_feature (19)..(19): 2'-deoxy-2'Fluoro
  misc_feature (20)..(20): Phosphorothioate or Phosphorodithioate 3'-Internucleotide Linkage (optionally present)
  misc_feature (1). .(19): ribonucleotide unmodified or modified as described for this sequence
uggcuccgucugucuucautt

SEQ ID NO: 877 - DNA, 21 bp, Artificial Sequence
  Description of Artificial Sequence: Target Sequence/siNA sense region (stab07)
  misc_feature (1)..(1): 5'-3 attached terminal deoxyabasic moiety, inverted abasic, inverted nucleotide or other terminal cap that is optionally present
  misc_feature (21)..(21): 3'-3 attached terminal deoxyabasic moiety, inverted abasic, inverted nucleotide or other terminal cap that is optionally present
  misc_feature (2)..(2): 2'-deoxy-2'Fluoro
  misc_feature (8)..(8): 2'-deoxy-2'Fluoro
  misc_feature (12)..(12): 2'-deoxy-2'Fluoro
  misc_feature (17)..(18): 2'-deoxy-2'Fluoro
  misc_feature (1)..(19): ribonucleotide unmodified or modified as described for this sequence
augaagacagacggagccatt

SEQ ID NO: 878 - DNA, 21 bp, Artificial Sequence
  Description of Artificial Sequence: Target Sequence/siNA antisense region (stab08)
  misc_feature (1)..(1): 2'-deoxy-2'Fluoro
  misc_feature (2)..(3): 2'-O-methyl
  misc_feature (4)..(7): 2'-deoxy-2'Fluoro
  misc_feature (8)..(8): 2'-O-methyl
  misc_feature (9)..(11): 2'-deoxy-2'Fluoro
  misc_feature (12)..(12): 2'-O-methyl
  misc_feature (13)..(17): 2'-deoxy-2'Fluoro
  misc_feature (18)..(18): 2'-O-methyl
  misc_feature (19)..(19): 2'-deoxy-2'Fluoro
  misc_feature (20)..(20): Phosphorothioate or Phosphorodithioate 3'-Internucleotide Linkage (optionally present)
  misc_feature (1)..(19): ribonucleotide unmodified or modified as described for this sequence
uggcuccgucugucuucautt

SEQ ID NO: 879 - DNA, 21 bp, Artificial Sequence
  Description of Artificial Sequence: Target Sequence/siNA sense region (stab09)
  misc_feature (1)..(1): 5'-3 attached terminal deoxyabasic moiety, inverted abasic, inverted nucleotide or other terminal cap that is optionally present
  misc_feature (21)..(21): 3'-3 attached terminal deoxyabasic moiety, inverted abasic, inverted nucleotide or other terminal cap that is optionally present
  misc_feature (1)..(19): ribonucleotide unmodified or modified as described for this sequence
augaagacagacggagccatt

SEQ ID NO: 880 - DNA, 21 bp, Artificial Sequence
  Description of Artificial Sequence: Target Sequence/siNA antisense region (stab10)
  misc_feature (20)..(20): Phosphorothioate or Phosphorodithioate 3'-Internucleotide Linkage (optionally present)
  misc_feature (1)..(19): ribonucleotide unmodified or modified as described for this sequence
uggcuccgucugucuucautt

SEQ ID NO: 881 - DNA, 21 bp, Artificial Sequence
  Description of Artificial Sequence: Target Sequence/siNA antisense region (stab19)
  misc_feature (21)..(21): 3'-3 attached terminal deoxyabasic moiety, inverted abasic, inverted nucleotide or other terminal cap that is optionally present
  misc_feature (1)..(1): 2'-deoxy-2'Fluoro
  misc_feature (2)..(3): 2'-O-methyl
  misc_feature (4)..(7): 2'-deoxy-2'Fluoro
  misc_feature (8)..(8): 2'-O-methyl
  misc_feature (9)..(11): 2'-deoxy-2'Fluoro
  misc_feature (12)..(12): 2'-O-methyl
  misc_feature (13)..(17): 2'-deoxy-2'Fluoro
  misc_feature (18)..(18): 2'-O-methyl
  misc_feature (19)..(19): 2'-deoxy-2'Fluoro
  misc_feature (1)..(19): ribonucleotide unmodified or modified as described for this sequence
uggcuccgucugucuucautt

SEQ ID NO: 882 - DNA, 21 bp, Artificial Sequence
  Description of Artificial Sequence: Target Sequence/siNA antisense region (stab22)
  misc_feature (21)..(21): 3'-3 attached terminal deoxyabasic moiety, inverted abasic, inverted nucleotide or other terminal cap that is optionally present
  misc_feature (20)..(20): Phosphorothioate or Phosphorodithioate 3'-Internucleotide Linkage (optionally present)
  misc_feature (1)..(19): ribonucleotide unmodified or modified as described for this sequence
uggcuccgucugucuucautt

SEQ ID NO: 883 - DNA, 21 bp, Artificial Sequence
  Description of Artificial Sequence: Target Sequence/siNA antisense region (stab25)
  misc_feature (4)..(7): 2'-deoxy-2'Fluoro
  misc_feature (8)..(8): 2'-O-methyl
  misc_feature (9)..(11): 2'-deoxy-2'Fluoro
  misc_feature (12)..(12): 2'-O-methyl
  misc_feature (13)..(17): 2'-deoxy-2'Fluoro
  misc_feature (18)..(18): 2'-O-methyl
  misc_feature (19)..(19): 2'-deoxy-2'Fluoro
  misc_feature (20)..(20): Phosphorothioate or Phosphorodithioate 3'-Internucleotide Linkage (optionally present)
  misc_feature (1). .(19): ribonucleotide unmodified or modified as described for this sequence
uggcuccgucugucuucautt

SEQ ID NO: 884 - RNA, 21 nt, Artificial Sequence
  Description of Artificial Sequence: Target Sequence/siNA antisense region (stab35)
  misc_feature (4)..(7): 2'-deoxy-2'Fluoro
  misc_feature (8)..(8): 2'-O-methyl
  misc_feature (9)..(11): 2'-deoxy-2'Fluoro
  misc_feature (12)..(12): 2'-O-methyl
  misc_feature (13)..(17): 2'-deoxy-2'Fluoro
  misc_feature (18)..(18): 2'-O-methyl
  misc_feature (19)..(19): 2'-deoxy-2'Fluoro
  misc_feature (20)..(21): 2'-O-methyl
uggcuccgucugucuucauuu

SEQ ID NO: 885 - RNA, 21 nt, Artificial Sequence
  Description of Artificial Sequence: Target Sequence/siNA antisense region (stab36)
  misc_feature (4)..(7): 2'-deoxy-2'Fluoro
  misc_feature (8)..(8): 2'-O-methyl
  misc_feature (9)..(11): 2'-deoxy-2'Fluoro
  misc_feature (12)..(12): 2'-O-methyl
  misc_feature (13)..(17): 2'-deoxy-2'Fluoro
  misc_feature (18)..(18): 2'-O-methyl
  misc_feature (19)..(19): 2'-deoxy-2'Fluoro
  misc_feature (20)..(21): 2'-O-methyl
uggcuccgucugucuucaugg

SEQ ID NO: 886 - RNA, 19 nt, Artificial Sequence
  Description of Artificial Sequence: Target Sequence/siNA sense region
acugugaaggcggcagguc

SEQ ID NO: 887 - RNA, 19 nt, Artificial Sequence
  Description of Artificial Sequence: Target Sequence/siNA antisense region
gaccugccgccuucacagu

SEQ ID NO: 888 - DNA, 21 bp, Artificial Sequence
  Description of Artificial Sequence: Target Sequence/siNA sense region (stab00)
  misc_feature (1)..(19): ribonucleotide unmodified or modified as described for this sequence
acugugaaggcggcagguctt

SEQ ID NO: 889 - DNA, 21 bp, Artificial Sequence
  Description of Artificial Sequence: Target Sequence/siNA antisense region (stab00as)
  misc_feature (1)..(19): ribonucleotide unmodified or modified as described for this sequence
gaccugccgccuucacagutt

SEQ ID NO: 890 - DNA, 21 bp, Artificial Sequence
  Description of Artificial Sequence: Target Sequence/siNA sense region (stab04)
  misc_feature (1)..(1): 5'-3 attached terminal deoxyabasic moiety, inverted abasic, inverted nucleotide or other terminal cap that is optionally present
  misc_feature (21)..(21): 3'-3 attached terminal deoxyabasic moiety, inverted abasic, inverted nucleotide or other terminal cap that is optionally present
  misc_feature (2)..(3): 2'-deoxy-2'Fluoro
  misc_feature (5)..(5): 2'-deoxy-2'Fluoro
  misc_feature (11)..(11): 2'-deoxy-2'Fluoro
  misc_feature (14)..(14): 2'-deoxy-2'Fluoro
  misc_feature (18)..(19): 2'-deoxy-2'Fluoro
  misc_feature (1). .(19): ribonucleotide unmodified or modified as described for this sequence
acugugaaggcggcagguctt

SEQ ID NO: 891 - DNA, 21 bp, Artificial Sequence
  Description of Artificial Sequence: Target Sequence/siNA antisense region (stab05)
  misc_feature (3)..(5): 2'-deoxy-2'Fluoro
  misc_feature (7)..(8): 2'-deoxy-2'Fluoro
  misc_feature (10)..(14): 2'-deoxy-2'Fluoro
  misc_feature (16)..(16): 2'-deoxy-2'Fluoro
  misc_feature (19)..(19): 2'-deoxy-2'Fluoro
  misc_feature (20)..(20): Phosphorothioate or Phosphorodithioate 3'-Internucleotide Linkage (optionally present)
  misc_feature (1). .(19): ribonucleotide unmodified or modified as described for this sequence
gaccugccgccuucacagutt

SEQ ID NO: 892 - DNA, 21 bp, Artificial Sequence
  Description of Artificial Sequence: Target Sequence/siNA sense region (stab07)
  misc_feature (1)..(1): 5'-3 attached terminal deoxyabasic moiety, inverted abasic, inverted nucleotide or other terminal cap that is optionally present
  misc_feature (21)..(21): 3'-3 attached terminal deoxyabasic moiety, inverted abasic, inverted nucleotide or other terminal cap that is optionally present
  misc_feature (2)..(3): 2'-deoxy-2'Fluoro
  misc_feature (5)..(5): 2'-deoxy-2'Fluoro
  misc_feature (11)..(11): 2'-deoxy-2'Fluoro
  misc_feature (14)..(14): 2'-deoxy-2'Fluoro
  misc_feature (18)..(19): 2'-deoxy-2'Fluoro
  misc_feature (1)..(19): ribonucleotide unmodified or modified as described for this sequence
acugugaaggcggcagguctt

SEQ ID NO: 893 - DNA, 21 bp, Artificial Sequence
  Description of Artificial Sequence: Target Sequence/siNA antisense region (stab08)
  misc_feature (1)..(2): 2'-O-methyl
  misc_feature (3)..(5): 2'-deoxy-2'Fluoro
  misc_feature (6)..(6): 2'-O-methyl
  misc_feature (7)..(8): 2'-deoxy-2'Fluoro
  misc_feature (9)..(9): 2'-O-methyl
  misc_feature (10)..(14): 2'-deoxy-2'Fluoro
  misc_feature (15)..(15): 2'-O-methyl
  misc_feature (16)..(16): 2'-deoxy-2'Fluoro
  misc_feature (17)..(18): 2'-O-methyl
  misc_feature (19)..(19): 2'-deoxy-2'Fluoro
  misc_feature (20)..(20): Phosphorothioate or Phosphorodithioate 3'-Internucleotide Linkage (optionally present)
  misc_feature (1)..(19): ribonucleotide unmodified or modified as described for this sequence
gaccugccgccuucacagutt

SEQ ID NO: 894 - DNA, 21 bp, Artificial Sequence
  Description of Artificial Sequence: Target Sequence/siNA sense region (stab09)
  misc_feature (1)..(1): 5'-3 attached terminal deoxyabasic moiety, inverted abasic, inverted nucleotide or other terminal cap that is optionally present
  misc_feature (21)..(21): 3'-3 attached terminal deoxyabasic moiety, inverted abasic, inverted nucleotide or other terminal cap that is optionally present
  misc_feature (1)..(19): ribonucleotide unmodified or modified as described for this sequence
acugugaaggcggcagguctt

SEQ ID NO: 895 - DNA, 21 bp, Artificial Sequence
  Description of Artificial Sequence: Target Sequence/siNA antisense region (stab10)
  misc_feature (20)..(20): Phosphorothioate or Phosphorodithioate 3'-Internucleotide Linkage (optionally present)
  misc_feature (1)..(19): ribonucleotide unmodified or modified as described for this sequence
gaccugccgccuucacagutt

SEQ ID NO: 896 - DNA, 21 bp, Artificial Sequence
  Description of Artificial Sequence: Target Sequence/siNA antisense region (stab19)
  misc_feature (21)..(21): 3'-3 attached terminal deoxyabasic moiety, inverted abasic, inverted nucleotide or other terminal cap that is optionally present
  misc_feature (1)..(2): 2'-O-methyl
  misc_feature (3)..(5): 2'-deoxy-2'Fluoro
  misc_feature (6)..(6): 2'-O-methyl
  misc_feature (7)..(8): 2'-deoxy-2'Fluoro
  misc_feature (9)..(9): 2'-O-methyl
  misc_feature (10)..(14): 2'-deoxy-2'Fluoro
  misc_feature (15)..(15): 2'-O-methyl
  misc_feature (16)..(16): 2'-deoxy-2'Fluoro
  misc_feature (17)..(18): 2'-O-methyl
  misc_feature (19)..(19): 2'-deoxy-2'Fluoro
  misc_feature (1)..(19): ribonucleotide unmodified or modified as described for this sequence
gaccugccgccuucacagutt

SEQ ID NO: 897 - DNA, 21 bp, Artificial Sequence
  Description of Artificial Sequence: Target Sequence/siNA antisense region (stab22)
  misc_feature (21)..(21): 3'-3 attached terminal deoxyabasic moiety, inverted abasic, inverted nucleotide or other terminal cap that is optionally present
  misc_feature (20)..(20): Phosphorothioate or Phosphorodithioate 3'-Internucleotide Linkage (optionally present)
  misc_feature (1)..(19): ribonucleotide unmodified or modified as described for this sequence
gaccugccgccuucacagutt

SEQ ID NO: 898 - DNA, 21 bp, Artificial Sequence
  Description of Artificial Sequence: Target Sequence/siNA antisense region (stab25)
  misc_feature (4)..(5): 2'-deoxy-2'Fluoro
  misc_feature (6)..(6): 2'-O-methyl
  misc_feature (7)..(8): 2'-deoxy-2'Fluoro
  misc_feature (9)..(9): 2'-O-methyl
  misc_feature (10)..(14): 2'-deoxy-2'Fluoro
  misc_feature (15)..(15): 2'-O-methyl
  misc_feature (16)..(16): 2'-deoxy-2'Fluoro
  misc_feature (17)..(18): 2'-O-methyl
  misc_feature (19)..(19): 2'-deoxy-2'Fluoro
  misc_feature (20)..(20): Phosphorothioate or Phosphorodithioate 3'-Internucleotide Linkage (optionally present)
  misc_feature (1). .(19): ribonucleotide unmodified or modified as described for this sequence
gaccugccgccuucacagutt

SEQ ID NO: 899 - RNA, 21 nt, Artificial Sequence
  Description of Artificial Sequence: Target Sequence/siNA antisense region (stab35)
  misc_feature (4)..(5): 2'-deoxy-2'Fluoro
  misc_feature (6)..(6): 2'-O-methyl
  misc_feature (7)..(8): 2'-deoxy-2'Fluoro
  misc_feature (9)..(9): 2'-O-methyl
  misc_feature (10)..(14): 2'-deoxy-2'Fluoro
  misc_feature (15)..(15): 2'-O-methyl
  misc_feature (16)..(16): 2'-deoxy-2'Fluoro
  misc_feature (17)..(18): 2'-O-methyl
  misc_feature (19)..(19): 2'-deoxy-2'Fluoro
  misc_feature (20)..(21): 2'-O-methyl
gaccugccgccuucacaguuu

SEQ ID NO: 900 - RNA, 21 nt, Artificial Sequence
  Description of Artificial Sequence: Target Sequence/siNA antisense region (stab36)
  misc_feature (4)..(5): 2'-deoxy-2'Fluoro
  misc_feature (6)..(6): 2'-O-methyl
  misc_feature (7)..(8): 2'-deoxy-2'Fluoro
  misc_feature (9)..(9): 2'-O-methyl
  misc_feature (10)..(14): 2'-deoxy-2'Fluoro
  misc_feature (15)..(15): 2'-O-methyl
  misc_feature (16)..(16): 2'-deoxy-2'Fluoro
  misc_feature (17)..(18): 2'-O-methyl
  misc_feature (19)..(19): 2'-deoxy-2'Fluoro
  misc_feature (20)..(21): 2'-O-methyl
gaccugccgccuucacagugg

SEQ ID NO: 901 - RNA, 19 nt, Artificial Sequence
  Description of Artificial Sequence: Target Sequence/siNA sense region
cucaguccccuggucucug

SEQ ID NO: 902 - RNA, 19 nt, Artificial Sequence
  Description of Artificial Sequence: Target Sequence/siNA antisense region
cagagaccaggggacugag

SEQ ID NO: 903 - DNA, 21 bp, Artificial Sequence
  Description of Artificial Sequence: Target Sequence/siNA sense region (stab00)
  misc_feature (1)..(19): ribonucleotide unmodified or modified as described for this sequence
cucaguccccuggucucugtt

SEQ ID NO: 904 - DNA, 21 bp, Artificial Sequence
  Description of Artificial Sequence: Target Sequence/siNA antisense region (stab00as)
  misc_feature (1)..(19): ribonucleotide unmodified or modified as described for this sequence
cagagaccaggggacugagtt

SEQ ID NO: 905 - DNA, 21 bp, Artificial Sequence
  Description of Artificial Sequence: Target Sequence/siNA sense region (stab04)
  misc_feature (1)..(1): 5'-3 attached terminal deoxyabasic moiety, inverted abasic, inverted nucleotide or other terminal cap that is optionally present
  misc_feature (21)..(21): 3'-3 attached terminal deoxyabasic moiety, inverted abasic, inverted nucleotide or other terminal cap that is optionally present
  misc_feature (1)..(3): 2'-deoxy-2'Fluoro
  misc_feature (6)..(11): 2'-deoxy-2'Fluoro
  misc_feature (14)..(18): 2'-deoxy-2'Fluoro
  misc_feature (1). .(19): ribonucleotide unmodified or modified as described for this sequence
cucaguccccuggucucugtt

SEQ ID NO: 906 - DNA, 21 bp, Artificial Sequence
  Description of Artificial Sequence: Target Sequence/siNA antisense region (stab05)
  misc_feature (1)..(1): 2'-deoxy-2'Fluoro
  misc_feature (7)..(8): 2'-deoxy-2'Fluoro
  misc_feature (15)..(16): 2'-deoxy-2'Fluoro
  misc_feature (20)..(20): Phosphorothioate or Phosphorodithioate 3'-Internucleotide Linkage (optionally present)
  misc_feature (1). .(19): ribonucleotide unmodified or modified as described for this sequence
cagagaccaggggacugagtt

SEQ ID NO: 907 - DNA, 21 bp, Artificial Sequence
  Description of Artificial Sequence: Target Sequence/siNA sense region (stab07)
  misc_feature (1)..(1): 5'-3 attached terminal deoxyabasic moiety, inverted abasic, inverted nucleotide or other terminal cap that is optionally present
  misc_feature (21)..(21): 3'-3 attached terminal deoxyabasic moiety, inverted abasic, inverted nucleotide or other terminal cap that is optionally present
  misc_feature (1)..(3): 2'-deoxy-2'Fluoro
  misc_feature (6)..(11): 2'-deoxy-2'Fluoro
  misc_feature (14)..(18): 2'-deoxy-2'Fluoro
cucaguccccuggucucugtt

SEQ ID NO: 908 - DNA, 21 bp, Artificial Sequence
  Description of Artificial Sequence: Target Sequence/siNA antisense region (stab08)
  misc_feature (1)..(1): 2'-deoxy-2'Fluoro
  misc_feature (2)..(6): 2'-O-methyl
  misc_feature (7)..(8): 2'-deoxy-2'Fluoro
  misc_feature (9)..(14): 2'-O-methyl
  misc_feature (15)..(16): 2'-deoxy-2'Fluoro
  misc_feature (17)..(19): 2'-O-methyl
  misc_feature (20)..(20): Phosphorothioate or Phosphorodithioate 3'-Internucleotide Linkage (optionally present)
  misc_feature (1)..(19): ribonucleotide unmodified or modified as described for this sequence
cagagaccaggggacugagtt

SEQ ID NO: 909 - DNA, 21 bp, Artificial Sequence
  Description of Artificial Sequence: Target Sequence/siNA sense region (stab09)
  misc_feature (1)..(1): 5'-3 attached terminal deoxyabasic moiety, inverted abasic, inverted nucleotide or other terminal cap that is optionally present
  misc_feature (21)..(21): 3'-3 attached terminal deoxyabasic moiety, inverted abasic, inverted nucleotide or other terminal cap that is optionally present
  misc_feature (1)..(19): ribonucleotide unmodified or modified as described for this sequence
cucaguccccuggucucugtt

SEQ ID NO: 910 - DNA, 21 bp, Artificial Sequence
  Description of Artificial Sequence: Target Sequence/siNA antisense region (stab10)
  misc_feature (20)..(20): Phosphorothioate or Phosphorodithioate 3'-Internucleotide Linkage (optionally present)
  misc_feature (1)..(19): ribonucleotide unmodified or modified as described for this sequence
cagagaccaggggacugagtt

SEQ ID NO: 911 - DNA, 21 bp, Artificial Sequence
  Description of Artificial Sequence: Target Sequence/siNA antisense region (stab19)
  misc_feature (21)..(21): 3'-3 attached terminal deoxyabasic moiety, inverted abasic, inverted nucleotide or other terminal cap that is optionally present
  misc_feature (1)..(1): 2'-deoxy-2'Fluoro
  misc_feature (2)..(6): 2'-O-methyl
  misc_feature (7)..(8): 2'-deoxy-2'Fluoro
  misc_feature (9)..(14): 2'-O-methyl
  misc_feature (15)..(16): 2'-deoxy-2'Fluoro
  misc_feature (17)..(19): 2'-O-methyl
  misc_feature (1)..(19): ribonucleotide unmodified or modified as described for this sequence
cagagaccaggggacugagtt

SEQ ID NO: 912 - DNA, 21 bp, Artificial Sequence
  Description of Artificial Sequence: Target Sequence/siNA antisense region (stab22)
  misc_feature (21)..(21): 3'-3 attached terminal deoxyabasic moiety, inverted abasic, inverted nucleotide or other terminal cap that is optionally present
  misc_feature (20)..(20): Phosphorothioate or Phosphorodithioate 3'-Internucleotide Linkage (optionally present)
  misc_feature (1)..(19): ribonucleotide unmodified or modified as described for this sequence
cagagaccaggggacugagtt

SEQ ID NO: 913 - DNA, 21 bp, Artificial Sequence
  Description of Artificial Sequence: Target Sequence/siNA antisense region (stab25)
  misc_feature (4)..(6): 2'-O-methyl
  misc_feature (7)..(8): 2'-deoxy-2'Fluoro
  misc_feature (9)..(14): 2'-O-methyl
  misc_feature (15)..(16): 2'-deoxy-2'Fluoro
  misc_feature (17)..(19): 2'-O-methyl
  misc_feature (20)..(20): Phosphorothioate or Phosphorodithioate 3'-Internucleotide Linkage (optionally present)
  misc_feature (1)..(3): ribonucleotide
cagagaccaggggacugagtt

SEQ ID NO: 914 - RNA, 21 nt, Artificial Sequence
  Description of Artificial Sequence: Target Sequence/siNA antisense region (stab35)
  misc_feature (4)..(6): 2'-O-methyl
  misc_feature (7)..(8): 2'-deoxy-2'Fluoro
  misc_feature (9)..(14): 2'-O-methyl
  misc_feature (15)..(16): 2'-deoxy-2'Fluoro
  misc_feature (17)..(21): 2'-O-methyl
cagagaccaggggacugaguu

SEQ ID NO: 915 - RNA, 21 nt, Artificial Sequence
  Description of Artificial Sequence: Target Sequence/siNA antisense region (stab36)
  misc_feature (4)..(6): 2'-O-methyl
  misc_feature (7)..(8): 2'-deoxy-2'Fluoro
  misc_feature (9)..(14): 2'-O-methyl
  misc_feature (15)..(16): 2'-deoxy-2'Fluoro
  misc_feature (17)..(21): 2'-O-methyl
cagagaccaggggacugagac

SEQ ID NO: 916 - RNA, 19 nt, Artificial Sequence
  Description of Artificial Sequence: Target Sequence/siNA sense region
ggcaccacugugcagacag

SEQ ID NO: 917 - RNA, 19 nt, Artificial Sequence
  Description of Artificial Sequence: Target Sequence/siNA antisense region
cugucugcacaguggugcc

SEQ ID NO: 918 - DNA, 21 bp, Artificial Sequence
  Description of Artificial Sequence: Target Sequence/siNA sense region (stab00)
  misc_feature (1)..(19): ribonucleotide unmodified or modified as described for this sequence
ggcaccacugugcagacagtt

SEQ ID NO: 919 - DNA, 21 bp, Artificial Sequence
  Description of Artificial Sequence: Target Sequence/siNA antisense region (stab00as)
  misc_feature (1)..(19): ribonucleotide unmodified or modified as described for this sequence
cugucugcacaguggugcctt

SEQ ID NO: 920 - DNA, 21 bp, Artificial Sequence
  Description of Artificial Sequence: Target Sequence/siNA sense region (stab04)
  misc_feature (1)..(1): 5'-3 attached terminal deoxyabasic moiety, inverted abasic, inverted nucleotide or other terminal cap that is optionally present
  misc_feature (21)..(21): 3'-3 attached terminal deoxyabasic moiety, inverted abasic, inverted nucleotide or other terminal cap that is optionally present
  misc_feature (3)..(3): 2'-deoxy-2'Fluoro
  misc_feature (5)..(6): 2'-deoxy-2'Fluoro
  misc_feature (8)..(9): 2'-deoxy-2'Fluoro
  misc_feature (11)..(11): 2'-deoxy-2'Fluoro
  misc_feature (13)..(13): 2'-deoxy-2'Fluoro
  misc_feature (17)..(17): 2'-deoxy-2'Fluoro
  misc_feature (1). .(19): ribonucleotide unmodified or modified as described for this sequence
ggcaccacugugcagacagtt

SEQ ID NO: 921 - DNA, 21 bp, Artificial Sequence
  Description of Artificial Sequence: Target Sequence/siNA antisense region (stab05)
  misc_feature (1)..(2): 2'-deoxy-2'Fluoro
  misc_feature (4)..(6): 2'-deoxy-2'Fluoro
  misc_feature (8)..(8): 2'-deoxy-2'Fluoro
  misc_feature (10)..(10): 2'-deoxy-2'Fluoro
  misc_feature (13)..(13): 2'-deoxy-2'Fluoro
  misc_feature (16)..(16): 2'-deoxy-2'Fluoro
  misc_feature (18)..(19): 2'-deoxy-2'Fluoro
  misc_feature (20)..(20): Phosphorothioate or Phosphorodithioate 3'-Internucleotide Linkage (optionally present)
  misc_feature (1). .(19): ribonucleotide unmodified or modified as described for this sequence
cugucugcacaguggugcctt

SEQ ID NO: 922 - DNA, 21 bp, Artificial Sequence
  Description of Artificial Sequence: Target Sequence/siNA sense region (stab07)
  misc_feature (1)..(1): 5'-3 attached terminal deoxyabasic moiety, inverted abasic, inverted nucleotide or other terminal cap that is optionally present
  misc_feature (21)..(21): 3'-3 attached terminal deoxyabasic moiety, inverted abasic, inverted nucleotide or other terminal cap that is optionally present
  misc_feature (3)..(3): 2'-deoxy-2'Fluoro
  misc_feature (5)..(6): 2'-deoxy-2'Fluoro
  misc_feature (8)..(9): 2'-deoxy-2'Fluoro
  misc_feature (11)..(11): 2'-deoxy-2'Fluoro
  misc_feature (13)..(13): 2'-deoxy-2'Fluoro
  misc_feature (17)..(17): 2'-deoxy-2'Fluoro
  misc_feature (1)..(19): ribonucleotide unmodified or modified as described for this sequence
ggcaccacugugcagacagtt

SEQ ID NO: 923 - DNA, 21 bp, Artificial Sequence
  Description of Artificial Sequence: Target Sequence/siNA antisense region (stab08)
  misc_feature (1)..(2): 2'-deoxy-2'Fluoro
  misc_feature (3)..(3): 2'-O-methyl
  misc_feature (4)..(6): 2'-deoxy-2'Fluoro
  misc_feature (7)..(7): 2'-O-methyl
  misc_feature (8)..(8): 2'-deoxy-2'Fluoro
  misc_feature (9)..(9): 2'-O-methyl
  misc_feature (10)..(10): 2'-deoxy-2'Fluoro
  misc_feature (11)..(12): 2'-O-methyl
  misc_feature (13)..(13): 2'-deoxy-2'Fluoro
  misc_feature (14)..(15): 2'-O-methyl
  misc_feature (16)..(16): 2'-deoxy-2'Fluoro
  misc_feature (17)..(17): 2'-O-methyl
  misc_feature (18)..(19): 2'-deoxy-2'Fluoro
  misc_feature (20)..(20): Phosphorothioate or Phosphorodithioate 3'-Internucleotide Linkage (optionally present)
  misc_feature (1)..(19): ribonucleotide unmodified or modified as described for this sequence
cugucugcacaguggugcctt

SEQ ID NO: 924 - DNA, 21 bp, Artificial Sequence
  Description of Artificial Sequence: Target Sequence/siNA sense region (stab09)
  misc_feature (1)..(1): 5'-3 attached terminal deoxyabasic moiety, inverted abasic, inverted nucleotide or other terminal cap that is optionally present
  misc_feature (21)..(21): 3'-3 attached terminal deoxyabasic moiety, inverted abasic, inverted nucleotide or other terminal cap that is optionally present
  misc_feature (1)..(19): ribonucleotide unmodified or modified as described for this sequence
ggcaccacugugcagacagtt

SEQ ID NO: 925 - DNA, 21 bp, Artificial Sequence
  Description of Artificial Sequence: Target Sequence/siNA antisense region (stab10)
  misc_feature (20)..(20): Phosphorothioate or Phosphorodithioate 3'-Internucleotide Linkage (optionally present)
  misc_feature (1)..(19): ribonucleotide unmodified or modified as described for this sequence
cugucugcacaguggugcctt

SEQ ID NO: 926 - DNA, 21 bp, Artificial Sequence
  Description of Artificial Sequence: Target Sequence/siNA antisense region (stab19)
  misc_feature (21)..(21): 3'-3 attached terminal deoxyabasic moiety, inverted abasic, inverted nucleotide or other terminal cap that is optionally present
  misc_feature (1)..(2): 2'-deoxy-2'Fluoro
  misc_feature (3)..(3): 2'-O-methyl
  misc_feature (4)..(6): 2'-deoxy-2'Fluoro
  misc_feature (7)..(7): 2'-O-methyl
  misc_feature (8)..(8): 2'-deoxy-2'Fluoro
  misc_feature (9)..(9): 2'-O-methyl
  misc_feature (10)..(10): 2'-deoxy-2'Fluoro
  misc_feature (11)..(12): 2'-O-methyl
  misc_feature (13)..(13): 2'-deoxy-2'Fluoro
  misc_feature (14)..(15): 2'-O-methyl
  misc_feature (16)..(16): 2'-deoxy-2'Fluoro
  misc_feature (17)..(17): 2'-O-methyl
  misc_feature (18)..(19): 2'-deoxy-2'Fluoro
  misc_feature (1)..(19): ribonucleotide unmodified or modified as described for this sequence
cugucugcacaguggugcctt

SEQ ID NO: 927 - DNA, 21 bp, Artificial Sequence
  Description of Artificial Sequence: Target Sequence/siNA antisense region (stab22)
  misc_feature (21)..(21): 3'-3 attached terminal deoxyabasic moiety, inverted abasic, inverted nucleotide or other terminal cap that is optionally present
  misc_feature (20)..(20): Phosphorothioate or Phosphorodithioate 3'-Internucleotide Linkage (optionally present)
  misc_feature (1)..(19): ribonucleotide unmodified or modified as described for this sequence
cugucugcacaguggugcctt

SEQ ID NO: 928 - DNA, 21 bp, Artificial Sequence
  Description of Artificial Sequence: Target Sequence/siNA antisense region (stab25)
  misc_feature (4)..(6): 2'-deoxy-2'Fluoro
  misc_feature (7)..(7): 2'-O-methyl
  misc_feature (8)..(8): 2'-deoxy-2'Fluoro
  misc_feature (9)..(9): 2'-O-methyl
  misc_feature (10)..(10): 2'-deoxy-2'Fluoro
  misc_feature (11)..(12): 2'-O-methyl
  misc_feature (13)..(13): 2'-deoxy-2'Fluoro
  misc_feature (14)..(15): 2'-O-methyl
  misc_feature (16)..(16): 2'-deoxy-2'Fluoro
  misc_feature (17)..(17): 2'-O-methyl
  misc_feature (18)..(19): 2'-deoxy-2'Fluoro
  misc_feature (20)..(20): Phosphorothioate or Phosphorodithioate 3'-Internucleotide Linkage (optionally present)
  misc_feature (1). .(19): ribonucleotide unmodified or modified as described for this sequence
cugucugcacaguggugcctt

SEQ ID NO: 929 - RNA, 21 nt, Artificial Sequence
  Description of Artificial Sequence: Target Sequence/siNA antisense region (stab35)
  misc_feature (4)..(6): 2'-deoxy-2'Fluoro
  misc_feature (7)..(7): 2'-O-methyl
  misc_feature (8)..(8): 2'-deoxy-2'Fluoro
  misc_feature (9)..(9): 2'-O-methyl
  misc_feature (10)..(10): 2'-deoxy-2'Fluoro
  misc_feature (11)..(12): 2'-O-methyl
  misc_feature (13)..(13): 2'-deoxy-2'Fluoro
  misc_feature (14)..(15): 2'-O-methyl
  misc_feature (16)..(16): 2'-deoxy-2'Fluoro
  misc_feature (17)..(17): 2'-O-methyl
  misc_feature (18)..(19): 2'-deoxy-2'Fluoro
  misc_feature (20)..(21): 2'-O-methyl
cugucugcacaguggugccuu

SEQ ID NO: 930 - RNA, 21 nt, Artificial Sequence
  Description of Artificial Sequence: Target Sequence/siNA antisense region (stab36)
  misc_feature (4)..(6): 2'-deoxy-2'Fluoro
  misc_feature (7)..(7): 2'-O-methyl
  misc_feature (8)..(8): 2'-deoxy-2'Fluoro
  misc_feature (9)..(9): 2'-O-methyl
  misc_feature (10)..(10): 2'-deoxy-2'Fluoro
  misc_feature (11)..(12): 2'-O-methyl
  misc_feature (13)..(13): 2'-deoxy-2'Fluoro
  misc_feature (14)..(15): 2'-O-methyl
  misc_feature (16)..(16): 2'-deoxy-2'Fluoro
  misc_feature (17)..(17): 2'-O-methyl
  misc_feature (18)..(19): 2'-deoxy-2'Fluoro
  misc_feature (20)..(21): 2'-O-methyl
cugucugcacaguggugccag

SEQ ID NO: 931 - RNA, 19 nt, Artificial Sequence
  Description of Artificial Sequence: Target Sequence/siNA sense region
gggccuuugccgacccugg

SEQ ID NO: 932 - RNA, 19 nt, Artificial Sequence
  Description of Artificial Sequence: Target Sequence/siNA antisense region
ccagggucggcaaaggccc

SEQ ID NO: 933 - DNA, 21 bp, Artificial Sequence
  Description of Artificial Sequence: Target Sequence/siNA sense region (stab00)
  misc_feature (1)..(19): ribonucleotide unmodified or modified as described for this sequence
gggccuuugccgacccuggtt

SEQ ID NO: 934 - DNA, 21 bp, Artificial Sequence
  Description of Artificial Sequence: Target Sequence/siNA antisense region (stab00as)
  misc_feature (1)..(19): ribonucleotide unmodified or modified as described for this sequence
ccagggucggcaaaggccctt

SEQ ID NO: 935 - DNA, 21 bp, Artificial Sequence
  Description of Artificial Sequence: Target Sequence/siNA sense region (stab04)
  misc_feature (1)..(1): 5'-3 attached terminal deoxyabasic moiety, inverted abasic, inverted nucleotide or other terminal cap that is optionally present
  misc_feature (21)..(21): 3'-3 attached terminal deoxyabasic moiety, inverted abasic, inverted nucleotide or other terminal cap that is optionally present
  misc_feature (4)..(8): 2'-deoxy-2'Fluoro
  misc_feature (10)..(11): 2'-deoxy-2'Fluoro
  misc_feature (14)..(17): 2'-deoxy-2'Fluoro
  misc_feature (1). .(19): ribonucleotide unmodified or modified as described for this sequence
gggccuuugccgacccuggtt

SEQ ID NO: 936 - DNA, 21 bp, Artificial Sequence
  Description of Artificial Sequence: Target Sequence/siNA antisense region (stab05)
  misc_feature (1)..(2): 2'-deoxy-2'Fluoro
  misc_feature (7)..(8): 2'-deoxy-2'Fluoro
  misc_feature (11)..(11): 2'-deoxy-2'Fluoro
  misc_feature (17)..(19): 2'-deoxy-2'Fluoro
  misc_feature (20)..(20): Phosphorothioate or Phosphorodithioate 3'-Internucleotide Linkage (optionally present)
  misc_feature (1). .(19): ribonucleotide unmodified or modified as described for this sequence
ccagggucggcaaaggccctt

SEQ ID NO: 937 - DNA, 21 bp, Artificial Sequence
  Description of Artificial Sequence: Target Sequence/siNA sense region (stab07)
  misc_feature (1)..(1): 5'-3 attached terminal deoxyabasic moiety, inverted abasic, inverted nucleotide or other terminal cap that is optionally present
  misc_feature (21)..(21): 3'-3 attached terminal deoxyabasic moiety, inverted abasic, inverted nucleotide or other terminal cap that is optionally present
  misc_feature (4)..(8): 2'-deoxy-2'Fluoro
  misc_feature (10)..(11): 2'-deoxy-2'Fluoro
  misc_feature (14)..(17): 2'-deoxy-2'Fluoro
  misc_feature (1)..(19): ribonucleotide unmodified or modified as described for this sequence
gggccuuugccgacccuggtt

SEQ ID NO: 938 - DNA, 21 bp, Artificial Sequence
  Description of Artificial Sequence: Target Sequence/siNA antisense region (stab08)
  misc_feature (1)..(2): 2'-deoxy-2'Fluoro
  misc_feature (3)..(6): 2'-O-methyl
  misc_feature (7)..(8): 2'-deoxy-2'Fluoro
  misc_feature (9)..(10): 2'-O-methyl
  misc_feature (11)..(11): 2'-deoxy-2'Fluoro
  misc_feature (12)..(16): 2'-O-methyl
  misc_feature (17)..(19): 2'-deoxy-2'Fluoro
  misc_feature (20)..(20): Phosphorothioate or Phosphorodithioate 3'-Internucleotide Linkage (optionally present)
  misc_feature (1)..(19): ribonucleotide unmodified or modified as described for this sequence
ccagggucggcaaaggccctt

SEQ ID NO: 939 - DNA, 21 bp, Artificial Sequence
  Description of Artificial Sequence: Target Sequence/siNA sense region (stab09)
  misc_feature (1)..(1): 5'-3 attached terminal deoxyabasic moiety, inverted abasic, inverted nucleotide or other terminal cap that is optionally present
  misc_feature (21)..(21): 3'-3 attached terminal deoxyabasic moiety, inverted abasic, inverted nucleotide or other terminal cap that is optionally present
  misc_feature (1)..(19): ribonucleotide unmodified or modified as described for this sequence
gggccuuugccgacccuggtt

SEQ ID NO: 940 - DNA, 21 bp, Artificial Sequence
  Description of Artificial Sequence: Target Sequence/siNA antisense region (stab10)
  misc_feature (20)..(20): Phosphorothioate or Phosphorodithioate 3'-Internucleotide Linkage (optionally present)
  misc_feature (1)..(19): ribonucleotide unmodified or modified as described for this sequence
ccagggucggcaaaggccctt

SEQ ID NO: 941 - DNA, 21 bp, Artificial Sequence
  Description of Artificial Sequence: Target Sequence/siNA antisense region (stab19)
  misc_feature (21)..(21): 3'-3 attached terminal deoxyabasic moiety, inverted abasic, inverted nucleotide or other terminal cap that is optionally present
  misc_feature (1)..(2): 2'-deoxy-2'Fluoro
  misc_feature (3)..(6): 2'-O-methyl
  misc_feature (7)..(8): 2'-deoxy-2'Fluoro
  misc_feature (9)..(10): 2'-O-methyl
  misc_feature (11)..(11): 2'-deoxy-2'Fluoro
  misc_feature (12)..(16): 2'-O-methyl
  misc_feature (17)..(19): 2'-deoxy-2'Fluoro
  misc_feature (1)..(19): ribonucleotide unmodified or modified as described for this sequence
ccagggucggcaaaggccctt

SEQ ID NO: 942 - DNA, 21 bp, Artificial Sequence
  Description of Artificial Sequence: Target Sequence/siNA antisense region (stab22)
  misc_feature (21)..(21): 3'-3 attached terminal deoxyabasic moiety, inverted abasic, inverted nucleotide or other terminal cap that is optionally present
  misc_feature (20)..(20): Phosphorothioate or Phosphorodithioate 3'-Internucleotide Linkage (optionally present)
  misc_feature (1)..(19): ribonucleotide unmodified or modified as described for this sequence
ccagggucggcaaaggccctt

SEQ ID NO: 943 - DNA, 21 bp, Artificial Sequence
  Description of Artificial Sequence: Target Sequence/siNA antisense region (stab25)
  misc_feature (4)..(6): 2'-O-methyl
  misc_feature (7)..(8): 2'-deoxy-2'Fluoro
  misc_feature (9)..(10): 2'-O-methyl
  misc_feature (11)..(11): 2'-deoxy-2'Fluoro
  misc_feature (12)..(16): 2'-O-methyl
  misc_feature (17)..(19): 2'-deoxy-2'Fluoro
  misc_feature (20)..(20): Phosphorothioate or Phosphorodithioate 3'-Internucleotide Linkage (optionally present)
  misc_feature (1). .(19): ribonucleotide unmodified or modified as described for this sequence
ccagggucggcaaaggccctt

SEQ ID NO: 944 - RNA, 21 nt, Artificial Sequence
  Description of Artificial Sequence: Target Sequence/siNA antisense region (stab35)
  misc_feature (4)..(6): 2'-O-methyl
  misc_feature (7)..(8): 2'-deoxy-2'Fluoro
  misc_feature (9)..(10): 2'-O-methyl
  misc_feature (11)..(11): 2'-deoxy-2'Fluoro
  misc_feature (12)..(16): 2'-O-methyl
  misc_feature (17)..(19): 2'-deoxy-2'Fluoro
  misc_feature (20)..(21): 2'-O-methyl
ccagggucggcaaaggcccuu

SEQ ID NO: 945 - RNA, 21 nt, Artificial Sequence
  Description of Artificial Sequence: Target Sequence/siNA antisense region (stab36)
  misc_feature (4)..(6): 2'-O-methyl
  misc_feature (7)..(8): 2'-deoxy-2'Fluoro
  misc_feature (9)..(10): 2'-O-methyl
  misc_feature (11)..(11): 2'-deoxy-2'Fluoro
  misc_feature (12)..(16): 2'-O-methyl
  misc_feature (17)..(19): 2'-deoxy-2'Fluoro
  misc_feature (20)..(21): 2'-O-methyl
ccagggucggcaaaggcccug

SEQ ID NO: 946 - RNA, 19 nt, Artificial Sequence
  Description of Artificial Sequence: Target Sequence/siNA sense region
gugaguggcggaaccaucu

SEQ ID NO: 947 - RNA, 19 nt, Artificial Sequence
  Description of Artificial Sequence: Target Sequence/siNA antisense region
agaugguuccgccacucac

SEQ ID NO: 948 - DNA, 21 bp, Artificial Sequence
  Description of Artificial Sequence: Target Sequence/siNA sense region (stab00)
  misc_feature (1)..(19): ribonucleotide unmodified or modified as described for this sequence
gugaguggcggaaccaucutt

SEQ ID NO: 949 - DNA, 21 bp, Artificial Sequence
  Description of Artificial Sequence: Target Sequence/siNA antisense region (stab00as)
  misc_feature (1)..(19): ribonucleotide unmodified or modified as described for this sequence
agaugguuccgccacucactt

SEQ ID NO: 950 - DNA, 21 bp, Artificial Sequence
  Description of Artificial Sequence: Target Sequence/siNA sense region (stab04)
  misc_feature (1)..(1): 5'-3 attached terminal deoxyabasic moiety, inverted abasic, inverted nucleotide or other terminal cap that is optionally present
  misc_feature (21)..(21): 3'-3 attached terminal deoxyabasic moiety, inverted abasic, inverted nucleotide or other terminal cap that is optionally present
  misc_feature (2)..(2): 2'-deoxy-2'Fluoro
  misc_feature (6)..(6): 2'-deoxy-2'Fluoro
  misc_feature (9)..(9): 2'-deoxy-2'Fluoro
  misc_feature (14)..(15): 2'-deoxy-2'Fluoro
  misc_feature (17)..(19): 2'-deoxy-2'Fluoro
  misc_feature (1). .(19): ribonucleotide unmodified or modified as described for this sequence
gugaguggcggaaccaucutt

SEQ ID NO: 951 - DNA, 21 bp, Artificial Sequence
  Description of Artificial Sequence: Target Sequence/siNA antisense region (stab05)
  misc_feature (4)..(4): 2'-deoxy-2'Fluoro
  misc_feature (7)..(10): 2'-deoxy-2'Fluoro
  misc_feature (12)..(13): 2'-deoxy-2'Fluoro
  misc_feature (15)..(17): 2'-deoxy-2'Fluoro
  misc_feature (19)..(19): 2'-deoxy-2'Fluoro
  misc_feature (20)..(20): Phosphorothioate or Phosphorodithioate 3'-Internucleotide Linkage (optionally present)
  misc_feature (1). .(19): ribonucleotide unmodified or modified as described for this sequence
agaugguuccgccacucactt

SEQ ID NO: 952 - DNA, 21 bp, Artificial Sequence
  Description of Artificial Sequence: Target Sequence/siNA sense region (stab07)
  misc_feature (1)..(1): 5'-3 attached terminal deoxyabasic moiety, inverted abasic, inverted nucleotide or other terminal cap that is optionally present
  misc_feature (21)..(21): 3'-3 attached terminal deoxyabasic moiety, inverted abasic, inverted nucleotide or other terminal cap that is optionally present
  misc_feature (2)..(2): 2'-deoxy-2'Fluoro
  misc_feature (6)..(6): 2'-deoxy-2'Fluoro
  misc_feature (9)..(9): 2'-deoxy-2'Fluoro
  misc_feature (14)..(15): 2'-deoxy-2'Fluoro
  misc_feature (17)..(19): 2'-deoxy-2'Fluoro
gugaguggcggaaccaucutt

SEQ ID NO: 953 - DNA, 21 bp, Artificial Sequence
  Description of Artificial Sequence: Target Sequence/siNA antisense region (stab08)
  misc_feature (1)..(3): 2'-O-methyl
  misc_feature (4)..(4): 2'-deoxy-2'Fluoro
  misc_feature (5)..(6): 2'-O-methyl
  misc_feature (7)..(10): 2'-deoxy-2'Fluoro
  misc_feature (11)..(11): 2'-O-methyl
  misc_feature (12)..(13): 2'-deoxy-2'Fluoro
  misc_feature (14)..(14): 2'-O-methyl
  misc_feature (15)..(17): 2'-deoxy-2'Fluoro
  misc_feature (18)..(18): 2'-O-methyl
  misc_feature (19)..(19): 2'-deoxy-2'Fluoro
  misc_feature (20)..(20): Phosphorothioate or Phosphorodithioate 3'-Internucleotide Linkage (optionally present)
agaugguuccgccacucactt

SEQ ID NO: 954 - DNA, 21 bp, Artificial Sequence
  Description of Artificial Sequence: Target Sequence/siNA sense region (stab09)
  misc_feature (1)..(1): 5'-3 attached terminal deoxyabasic moiety, inverted abasic, inverted nucleotide or other terminal cap that is optionally present
  misc_feature (21)..(21): 3'-3 attached terminal deoxyabasic moiety, inverted abasic, inverted nucleotide or other terminal cap that is optionally present
  misc_feature (1)..(19): ribonucleotide unmodified or modified as described for this sequence
gugaguggcggaaccaucutt

SEQ ID NO: 955 - DNA, 21 bp, Artificial Sequence
  Description of Artificial Sequence: Target Sequence/siNA antisense region (stab10)
  misc_feature (20)..(20): Phosphorothioate or Phosphorodithioate 3'-Internucleotide Linkage (optionally present)
  misc_feature (1)..(19): ribonucleotide unmodified or modified as described for this sequence
agaugguuccgccacucactt

SEQ ID NO: 956 - DNA, 21 bp, Artificial Sequence
  Description of Artificial Sequence: Target Sequence/siNA antisense region (stab19)
  misc_feature (21)..(21): 3'-3 attached terminal deoxyabasic moiety, inverted abasic, inverted nucleotide or other terminal cap that is optionally present
  misc_feature (1)..(3): 2'-O-methyl
  misc_feature (4)..(4): 2'-deoxy-2'Fluoro
  misc_feature (5)..(6): 2'-O-methyl
  misc_feature (7)..(10): 2'-deoxy-2'Fluoro
  misc_feature (11)..(11): 2'-O-methyl
  misc_feature (12)..(13): 2'-deoxy-2'Fluoro
  misc_feature (14)..(14): 2'-O-methyl
  misc_feature (15)..(17): 2'-deoxy-2'Fluoro
  misc_feature (18)..(18): 2'-O-methyl
  misc_feature (19)..(19): 2'-deoxy-2'Fluoro
agaugguuccgccacucactt

SEQ ID NO: 957 - DNA, 21 bp, Artificial Sequence
  Description of Artificial Sequence: Target Sequence/siNA antisense region (stab22)
  misc_feature (21)..(21): 3'-3 attached terminal deoxyabasic moiety, inverted abasic, inverted nucleotide or other terminal cap that is optionally present
  misc_feature (20)..(20): Phosphorothioate or Phosphorodithioate 3'-Internucleotide Linkage (optionally present)
  misc_feature (1)..(19): ribonucleotide unmodified or modified as described for this sequence
agaugguuccgccacucactt

SEQ ID NO: 958 - DNA, 21 bp, Artificial Sequence
  Description of Artificial Sequence: Target Sequence/siNA antisense region (stab25)
  misc_feature (4)..(4): 2'-deoxy-2'Fluoro
  misc_feature (5)..(6): 2'-O-methyl
  misc_feature (7)..(10): 2'-deoxy-2'Fluoro
  misc_feature (11)..(11): 2'-O-methyl
  misc_feature (12)..(13): 2'-deoxy-2'Fluoro
  misc_feature (14)..(14): 2'-O-methyl
  misc_feature (15)..(17): 2'-deoxy-2'Fluoro
  misc_feature (18)..(18): 2'-O-methyl
  misc_feature (19)..(19): 2'-deoxy-2'Fluoro
  misc_feature (20)..(20): Phosphorothioate or Phosphorodithioate 3'-Internucleotide Linkage (optionally present)
  misc_feature (1). .(19): ribonucleotide unmodified or modified as described for this sequence
agaugguuccgccacucactt

SEQ ID NO: 959 - RNA, 21 nt, Artificial Sequence
  Description of Artificial Sequence: Target Sequence/siNA antisense region (stab35)
  misc_feature (4)..(4): 2'-deoxy-2'Fluoro
  misc_feature (5)..(6): 2'-O-methyl
  misc_feature (7)..(10): 2'-deoxy-2'Fluoro
  misc_feature (11)..(11): 2'-O-methyl
  misc_feature (12)..(13): 2'-deoxy-2'Fluoro
  misc_feature (14)..(14): 2'-O-methyl
  misc_feature (15)..(17): 2'-deoxy-2'Fluoro
  misc_feature (18)..(18): 2'-O-methyl
  misc_feature (19)..(19): 2'-deoxy-2'Fluoro
  misc_feature (20)..(21): 2'-O-methyl
agaugguuccgccacucacuu

SEQ ID NO: 960 - RNA, 21 nt, Artificial Sequence
  Description of Artificial Sequence: Target Sequence/siNA antisense region (stab36)
  misc_feature (4)..(4): 2'-deoxy-2'Fluoro
  misc_feature (5)..(6): 2'-O-methyl
  misc_feature (7)..(10): 2'-deoxy-2'Fluoro
  misc_feature (11)..(11): 2'-O-methyl
  misc_feature (12)..(13): 2'-deoxy-2'Fluoro
  misc_feature (14)..(14): 2'-O-methyl
  misc_feature (15)..(17): 2'-deoxy-2'Fluoro
  misc_feature (18)..(18): 2'-O-methyl
  misc_feature (19)..(19): 2'-deoxy-2'Fluoro
  misc_feature (20)..(21): 2'-O-methyl
agaugguuccgccacucacca

SEQ ID NO: 961 - RNA, 19 nt, Artificial Sequence
  Description of Artificial Sequence: Target Sequence/siNA sense region
uuggcaacagucccacugg

SEQ ID NO: 962 - RNA, 19 nt, Artificial Sequence
  Description of Artificial Sequence: Target Sequence/siNA antisense region
ccagugggacuguugccaa

SEQ ID NO: 963 - DNA, 21 bp, Artificial Sequence
  Description of Artificial Sequence: Target Sequence/siNA sense region (stab00)
  misc_feature (1)..(19): ribonucleotide unmodified or modified as described for this sequence
uuggcaacagucccacuggtt

SEQ ID NO: 964 - DNA, 21 bp, Artificial Sequence
  Description of Artificial Sequence: Target Sequence/siNA antisense region (stab00as)
  misc_feature (1)..(19): ribonucleotide unmodified or modified as described for this sequence
ccagugggacuguugccaatt

SEQ ID NO: 965 - DNA, 21 bp, Artificial Sequence
  Description of Artificial Sequence: Target Sequence/siNA sense region (stab04)
  misc_feature (1)..(1): 5'-3 attached terminal deoxyabasic moiety, inverted abasic, inverted nucleotide or other terminal cap that is optionally present
  misc_feature (21)..(21): 3'-3 attached terminal deoxyabasic moiety, inverted abasic, inverted nucleotide or other terminal cap that is optionally present
  misc_feature (1)..(2): 2'-deoxy-2'Fluoro
  misc_feature (5)..(5): 2'-deoxy-2'Fluoro
  misc_feature (8)..(8): 2'-deoxy-2'Fluoro
  misc_feature (11)..(14): 2'-deoxy-2'Fluoro
  misc_feature (16)..(17): 2'-deoxy-2'Fluoro
  misc_feature (1). .(19): ribonucleotide unmodified or modified as described for this sequence
uuggcaacagucccacuggtt

SEQ ID NO: 966 - DNA, 21 bp, Artificial Sequence
  Description of Artificial Sequence: Target Sequence/siNA antisense region (stab05)
  misc_feature (1)..(2): 2'-deoxy-2'Fluoro
  misc_feature (5)..(5): 2'-deoxy-2'Fluoro
  misc_feature (10)..(11): 2'-deoxy-2'Fluoro
  misc_feature (13)..(14): 2'-deoxy-2'Fluoro
  misc_feature (16)..(17): 2'-deoxy-2'Fluoro
  misc_feature (20)..(20): Phosphorothioate or Phosphorodithioate 3'-Internucleotide Linkage (optionally present)
  misc_feature (1). .(19): ribonucleotide unmodified or modified as described for this sequence
ccagugggacuguugccaatt

SEQ ID NO: 967 - DNA, 21 bp, Artificial Sequence
  Description of Artificial Sequence: Target Sequence/siNA sense region (stab07)
  misc_feature (1)..(1): 5'-3 attached terminal deoxyabasic moiety, inverted abasic, inverted nucleotide or other terminal cap that is optionally present
  misc_feature (21)..(21): 3'-3 attached terminal deoxyabasic moiety, inverted abasic, inverted nucleotide or other terminal cap that is optionally present
  misc_feature (1)..(2): 2'-deoxy-2'Fluoro
  misc_feature (5)..(5): 2'-deoxy-2'Fluoro
  misc_feature (8)..(8): 2'-deoxy-2'Fluoro
  misc_feature (11)..(14): 2'-deoxy-2'Fluoro
  misc_feature (16)..(17): 2'-deoxy-2'Fluoro
  misc_feature (1)..(19): ribonucleotide unmodified or modified as described for this sequence
uuggcaacagucccacuggtt

SEQ ID NO: 968 - DNA, 21 bp, Artificial Sequence
  Description of Artificial Sequence: Target Sequence/siNA antisense region (stab08)
  misc_feature (1)..(2): 2'-deoxy-2'Fluoro
  misc_feature (3)..(4): 2'-O-methyl
  misc_feature (5)..(5): 2'-deoxy-2'Fluoro
  misc_feature (6)..(9): 2'-O-methyl
  misc_feature (10)..(11): 2'-deoxy-2'Fluoro
  misc_feature (12)..(12): 2'-O-methyl
  misc_feature (13)..(14): 2'-deoxy-2'Fluoro
  misc_feature (15)..(15): 2'-O-methyl
  misc_feature (16)..(17): 2'-deoxy-2'Fluoro
  misc_feature (18)..(19): 2'-O-methyl
  misc_feature (20)..(20): Phosphorothioate or Phosphorodithioate 3'-Internucleotide
  misc_feature (1)..(19): ribonucleotide unmodified or modified as described for this sequence
ccagugggacuguugccaatt

SEQ ID NO: 969 - DNA, 21 bp, Artificial Sequence
  Description of Artificial Sequence: Target Sequence/siNA sense region (stab09)
  misc_feature (1)..(1): 5'-3 attached terminal deoxyabasic moiety, inverted abasic, inverted nucleotide or other terminal cap that is optionally present
  misc_feature (21)..(21): 3'-3 attached terminal deoxyabasic moiety, inverted abasic, inverted nucleotide or other terminal cap that is optionally present
  misc_feature (1)..(19): ribonucleotide unmodified or modified as described for this sequence
uuggcaacagucccacuggtt

SEQ ID NO: 970 - DNA, 21 bp, Artificial Sequence
  Description of Artificial Sequence: Target Sequence/siNA antisense region (stab10)
  misc_feature (20)..(20): Phosphorothioate or Phosphorodithioate 3'-Internucleotide Linkage (optionally present)
  misc_feature (1)..(19): ribonucleotide unmodified or modified as described for this sequence
ccagugggacuguugccaatt

SEQ ID NO: 971 - DNA, 21 bp, Artificial Sequence
  Description of Artificial Sequence: Target Sequence/siNA antisense region (stab19)
  misc_feature (21)..(21): 3'-3 attached terminal deoxyabasic moiety, inverted abasic, inverted nucleotide or other terminal cap that is optionally present
  misc_feature (1)..(2): 2'-deoxy-2'Fluoro
  misc_feature (3)..(4): 2'-O-methyl
  misc_feature (5)..(5): 2'-deoxy-2'Fluoro
  misc_feature (6)..(9): 2'-O-methyl
  misc_feature (10)..(11): 2'-deoxy-2'Fluoro
  misc_feature (12)..(12): 2'-O-methyl
  misc_feature (13)..(14): 2'-deoxy-2'Fluoro
  misc_feature (15)..(15): 2'-O-methyl
  misc_feature (16)..(17): 2'-deoxy-2'Fluoro
  misc_feature (18)..(19): 2'-O-methyl
  misc_feature (1)..(19): ribonucleotide unmodified or modified as described for this sequence
ccagugggacuguugccaatt

SEQ ID NO: 972 - DNA, 21 bp, Artificial Sequence
  Description of Artificial Sequence: Target Sequence/siNA antisense region (stab22)
  misc_feature (21)..(21): 3'-3 attached terminal deoxyabasic moiety, inverted abasic, inverted nucleotide or other terminal cap that is optionally present
  misc_feature (20)..(20): Phosphorothioate or Phosphorodithioate 3'-Internucleotide Linkage (optionally present)
  misc_feature (1)..(19): ribonucleotide unmodified or modified as described for this sequence
ccagugggacuguugccaatt

SEQ ID NO: 973 - DNA, 21 bp, Artificial Sequence
  Description of Artificial Sequence: Target Sequence/siNA antisense region (stab25)
  misc_feature (4)..(4): 2'-O-methyl
  misc_feature (5)..(5): 2'-deoxy-2'Fluoro
  misc_feature (6)..(9): 2'-O-methyl
  misc_feature (10)..(11): 2'-deoxy-2'Fluoro
  misc_feature (12)..(12): 2'-O-methyl
  misc_feature (13)..(14): 2'-deoxy-2'Fluoro
  misc_feature (15)..(15): 2'-O-methyl
  misc_feature (16)..(17): 2'-deoxy-2'Fluoro
  misc_feature (18)..(19): 2'-O-methyl
  misc_feature (20)..(20): Phosphorothioate or Phosphorodithioate 3'-Internucleotide Linkage (optionally present)
  misc_feature (1). .(19): ribonucleotide unmodified or modified as described for this sequence
ccagugggacuguugccaatt

SEQ ID NO: 974 - RNA, 21 nt, Artificial Sequence
  Description of Artificial Sequence: Target Sequence/siNA antisense region (stab35)
  misc_feature (4)..(4): 2'-O-methyl
  misc_feature (5)..(5): 2'-deoxy-2'Fluoro
  misc_feature (6)..(9): 2'-O-methyl
  misc_feature (10)..(11): 2'-deoxy-2'Fluoro
  misc_feature (12)..(12): 2'-O-methyl
  misc_feature (13)..(14): 2'-deoxy-2'Fluoro
  misc_feature (15)..(15): 2'-O-methyl
  misc_feature (16)..(17): 2'-deoxy-2'Fluoro
  misc_feature (18)..(21): 2'-O-methyl
ccagugggacuguugccaauu

SEQ ID NO: 975 - RNA, 21 nt, Artificial Sequence
  Description of Artificial Sequence: Target Sequence/siNA antisense region (stab36)
  misc_feature (4)..(4): 2'-O-methyl
  misc_feature (5)..(5): 2'-deoxy-2'Fluoro
  misc_feature (6)..(9): 2'-O-methyl
  misc_feature (10)..(11): 2'-deoxy-2'Fluoro
  misc_feature (12)..(12): 2'-O-methyl
  misc_feature (13)..(14): 2'-deoxy-2'Fluoro
  misc_feature (15)..(15): 2'-O-methyl
  misc_feature (16)..(17): 2'-deoxy-2'Fluoro
  misc_feature (18)..(21): 2'-O-methyl
ccagugggacuguugccaaga

SEQ ID NO: 976 - RNA, 19 nt, Artificial Sequence
  Description of Artificial Sequence: Target Sequence/siNA sense region
gucguagaugcggagaagc

SEQ ID NO: 977 - RNA, 19 nt, Artificial Sequence
  Description of Artificial Sequence: Target Sequence/siNA antisense region
gcuucuccgcaucuacgac

SEQ ID NO: 978 - DNA, 21 bp, Artificial Sequence
  Description of Artificial Sequence: Target Sequence/siNA sense region (stab00)
  misc_feature (1)..(19): ribonucleotide unmodified or modified as described for this sequence
gucguagaugcggagaagctt

SEQ ID NO: 979 - DNA, 21 bp, Artificial Sequence
  Description of Artificial Sequence: Target Sequence/siNA antisense region (stab00as)
  misc_feature (1)..(19): ribonucleotide unmodified or modified as described for this sequence
gcuucuccgcaucuacgactt

SEQ ID NO: 980 - DNA, 21 bp, Artificial Sequence
  Description of Artificial Sequence: Target Sequence/siNA sense region (stab04)
  misc_feature (1)..(1): 5'-3 attached terminal deoxyabasic moiety, inverted abasic, inverted nucleotide or other terminal cap that is optionally present
  misc_feature (21)..(21): 3'-3 attached terminal deoxyabasic moiety, inverted abasic, inverted nucleotide or other terminal cap that is optionally present
  misc_feature (2)..(3): 2'-deoxy-2'Fluoro
  misc_feature (5)..(5): 2'-deoxy-2'Fluoro
  misc_feature (9)..(9): 2'-deoxy-2'Fluoro
  misc_feature (11)..(11): 2'-deoxy-2'Fluoro
  misc_feature (19)..(19): 2'-deoxy-2'Fluoro
  misc_feature (1). .(19): ribonucleotide unmodified or modified as described for this sequence
gucguagaugcggagaagctt

SEQ ID NO: 981 - DNA, 21 bp, Artificial Sequence
  Description of Artificial Sequence: Target Sequence/siNA antisense region (stab05)
  misc_feature (2)..(8): 2'-deoxy-2'Fluoro
  misc_feature (10)..(10): 2'-deoxy-2'Fluoro
  misc_feature (12)..(14): 2'-deoxy-2'Fluoro
  misc_feature (16)..(16): 2'-deoxy-2'Fluoro
  misc_feature (19)..(19): 2'-deoxy-2'Fluoro
  misc_feature (20)..(20): Phosphorothioate or Phosphorodithioate 3'-Internucleotide Linkage (optionally present)
  misc_feature (1). .(19): ribonucleotide unmodified or modified as described for this sequence
gcuucuccgcaucuacgactt

SEQ ID NO: 982 - DNA, 21 bp, Artificial Sequence
  Description of Artificial Sequence: Target Sequence/siNA sense region (stab07)
  misc_feature (1)..(1): 5'-3 attached terminal deoxyabasic moiety, inverted abasic, inverted nucleotide or other terminal cap that is optionally present
  misc_feature (21)..(21): 3'-3 attached terminal deoxyabasic moiety, inverted abasic, inverted nucleotide or other terminal cap that is optionally present
  misc_feature (2)..(3): 2'-deoxy-2'Fluoro
  misc_feature (5)..(5): 2'-deoxy-2'Fluoro
  misc_feature (9)..(9): 2'-deoxy-2'Fluoro
  misc_feature (11)..(11): 2'-deoxy-2'Fluoro
  misc_feature (19)..(19): 2'-deoxy-2'Fluoro
  misc_feature (1)..(19): ribonucleotide unmodified or modified as described for this sequence
gucguagaugcggagaagctt

SEQ ID NO: 983 - DNA, 21 bp, Artificial Sequence
  Description of Artificial Sequence: Target Sequence/siNA antisense region (stab08)
  misc_feature (1)..(1): 2'-O-methyl
  misc_feature (2)..(8): 2'-deoxy-2'Fluoro
  misc_feature (9)..(9): 2'-O-methyl
  misc_feature (10)..(10): 2'-deoxy-2'Fluoro
  misc_feature (11)..(11): 2'-O-methyl
  misc_feature (12)..(14): 2'-deoxy-2'Fluoro
  misc_feature (15)..(15): 2'-O-methyl
  misc_feature (16)..(16): 2'-deoxy-2'Fluoro
  misc_feature (17)..(18): 2'-O-methyl
  misc_feature (19)..(19): 2'-deoxy-2'Fluoro
  misc_feature (20)..(20): Phosphorothioate or Phosphorodithioate 3'-Internucleotide Linkage (optionally present)
  misc_feature (1)..(19): ribonucleotide unmodified or modified as described for this sequence
gcuucuccgcaucuacgactt

SEQ ID NO: 984 - DNA, 21 bp, Artificial Sequence
  Description of Artificial Sequence: Target Sequence/siNA sense region (stab09)
  misc_feature (1)..(1): 5'-3 attached terminal deoxyabasic moiety, inverted abasic, inverted nucleotide or other terminal cap that is optionally present
  misc_feature (21)..(21): 3'-3 attached terminal deoxyabasic moiety, inverted abasic, inverted nucleotide or other terminal cap that is optionally present
  misc_feature (1)..(19): ribonucleotide unmodified or modified as described for this sequence
gucguagaugcggagaagctt

SEQ ID NO: 985 - DNA, 21 bp, Artificial Sequence
  Description of Artificial Sequence: Target Sequence/siNA antisense region (stab10)
  misc_feature (20)..(20): Phosphorothioate or Phosphorodithioate 3'-Internucleotide Linkage (optionally present)
  misc_feature (1)..(19): ribonucleotide unmodified or modified as described for this sequence
gcuucuccgcaucuacgactt

SEQ ID NO: 986 - DNA, 21 bp, Artificial Sequence
  Description of Artificial Sequence: Target Sequence/siNA antisense region (stab19)
  misc_feature (21)..(21): 3'-3 attached terminal deoxyabasic moiety, inverted abasic, inverted nucleotide or other terminal cap that is optionally present
  misc_feature (1)..(1): 2'-O-methyl
  misc_feature (2)..(8): 2'-deoxy-2'Fluoro
  misc_feature (9)..(9): 2'-O-methyl
  misc_feature (10)..(10): 2'-deoxy-2'Fluoro
  misc_feature (11)..(11): 2'-O-methyl
  misc_feature (12)..(14): 2'-deoxy-2'Fluoro
  misc_feature (15)..(15): 2'-O-methyl
  misc_feature (16)..(16): 2'-deoxy-2'Fluoro
  misc_feature (17)..(18): 2'-O-methyl
  misc_feature (19)..(19): 2'-deoxy-2'Fluoro
  misc_feature (1)..(19): ribonucleotide unmodified or modified as described for this sequence
gcuucuccgcaucuacgactt

SEQ ID NO: 987 - DNA, 21 bp, Artificial Sequence
  Description of Artificial Sequence: Target Sequence/siNA antisense region (stab22)
  misc_feature (21)..(21): 3'-3 attached terminal deoxyabasic moiety, inverted abasic, inverted nucleotide or other terminal cap that is optionally present
  misc_feature (20)..(20): Phosphorothioate or Phosphorodithioate 3'-Internucleotide Linkage (optionally present)
  misc_feature (1)..(19): ribonucleotide unmodified or modified as described for this sequence
gcuucuccgcaucuacgactt

SEQ ID NO: 988 - DNA, 21 bp, Artificial Sequence
  Description of Artificial Sequence: Target Sequence/siNA antisense region (stab25)
  misc_feature (4)..(8): 2'-deoxy-2'Fluoro
  misc_feature (9)..(9): 2'-O-methyl
  misc_feature (10)..(10): 2'-deoxy-2'Fluoro
  misc_feature (11)..(11): 2'-O-methyl
  misc_feature (12)..(14): 2'-deoxy-2'Fluoro
  misc_feature (15)..(15): 2'-O-methyl
  misc_feature (16)..(16): 2'-deoxy-2'Fluoro
  misc_feature (17)..(18): 2'-O-methyl
  misc_feature (19)..(19): 2'-deoxy-2'Fluoro
  misc_feature (20)..(20): Phosphorothioate or Phosphorodithioate 3'-Internucleotide Linkage (optionally present)
  misc_feature (1). .(19): ribonucleotide unmodified or modified as described for this sequence
gcuucuccgcaucuacgactt

SEQ ID NO: 989 - RNA, 21 nt, Artificial Sequence
  Description of Artificial Sequence: Target Sequence/siNA antisense region (stab35)
  misc_feature (4)..(8): 2'-deoxy-2'Fluoro
  misc_feature (9)..(9): 2'-O-methyl
  misc_feature (10)..(10): 2'-deoxy-2'Fluoro
  misc_feature (11)..(11): 2'-O-methyl
  misc_feature (12)..(14): 2'-deoxy-2'Fluoro
  misc_feature (15)..(15): 2'-O-methyl
  misc_feature (16)..(16): 2'-deoxy-2'Fluoro
  misc_feature (17)..(18): 2'-O-methyl
  misc_feature (19)..(19): 2'-deoxy-2'Fluoro
  misc_feature (20)..(21): 2'-O-methyl
gcuucuccgcaucuacgacuu

SEQ ID NO: 990 - RNA, 21 nt, Artificial Sequence
  Description of Artificial Sequence: Target Sequence/siNA antisense region (stab36)
  misc_feature (4)..(8): 2'-deoxy-2'Fluoro
  misc_feature (9)..(9): 2'-O-methyl
  misc_feature (10)..(10): 2'-deoxy-2'Fluoro
  misc_feature (11)..(11): 2'-O-methyl
  misc_feature (12)..(14): 2'-deoxy-2'Fluoro
  misc_feature (15)..(15): 2'-O-methyl
  misc_feature (16)..(16): 2'-deoxy-2'Fluoro
  misc_feature (17)..(18): 2'-O-methyl
  misc_feature (19)..(19): 2'-deoxy-2'Fluoro
  misc_feature (20)..(21): 2'-O-methyl
gcuucuccgcaucuacgacca

SEQ ID NO: 991 - RNA, 19 nt, Artificial Sequence
  Description of Artificial Sequence: Target Sequence/siNA sense region
cugccuaucaaccggcucg

SEQ ID NO: 992 - RNA, 19 nt, Artificial Sequence
  Description of Artificial Sequence: Target Sequence/siNA antisense region
cgagccgguugauaggcag

SEQ ID NO: 993 - DNA, 21 bp, Artificial Sequence
  Description of Artificial Sequence: Target Sequence/siNA sense region (stab00)
  misc_feature (1)..(19): ribonucleotide unmodified or modified as described for this sequence
cugccuaucaaccggcucgtt

SEQ ID NO: 994 - DNA, 21 bp, Artificial Sequence
  Description of Artificial Sequence: Target Sequence/siNA antisense region (stab00as)
  misc_feature (1)..(19): ribonucleotide unmodified or modified as described for this sequence
cgagccgguugauaggcagtt

SEQ ID NO: 995 - DNA, 21 bp, Artificial Sequence
  Description of Artificial Sequence: Target Sequence/siNA sense region (stab04)
  misc_feature (1)..(1): 5'-3 attached terminal deoxyabasic moiety, inverted abasic, inverted nucleotide or other terminal cap that is optionally present
  misc_feature (21)..(21): 3'-3 attached terminal deoxyabasic moiety, inverted abasic, inverted nucleotide or other terminal cap that is optionally present
  misc_feature (1)..(2): 2'-deoxy-2'Fluoro
  misc_feature (4)..(6): 2'-deoxy-2'Fluoro
  misc_feature (8)..(9): 2'-deoxy-2'Fluoro
  misc_feature (12)..(13): 2'-deoxy-2'Fluoro
  misc_feature (16)..(18): 2'-deoxy-2'Fluoro
  misc_feature (1). .(19): ribonucleotide unmodified or modified as described for this sequence
cugccuaucaaccggcucgtt

SEQ ID NO: 996 - DNA, 21 bp, Artificial Sequence
  Description of Artificial Sequence: Target Sequence/siNA antisense region (stab05)
  misc_feature (1)..(1): 2'-deoxy-2'Fluoro
  misc_feature (5)..(6): 2'-deoxy-2'Fluoro
  misc_feature (9)..(10): 2'-deoxy-2'Fluoro
  misc_feature (13)..(13): 2'-deoxy-2'Fluoro
  misc_feature (17)..(17): 2'-deoxy-2'Fluoro
  misc_feature (20)..(20): Phosphorothioate or Phosphorodithioate 3'-Internucleotide Linkage (optionally present)
  misc_feature (1). .(19): ribonucleotide unmodified or modified as described for this sequence
cgagccgguugauaggcagtt

SEQ ID NO: 997 - DNA, 21 bp, Artificial Sequence
  Description of Artificial Sequence: Target Sequence/siNA sense region (stab07)
  misc_feature (1)..(1): 5'-3 attached terminal deoxyabasic moiety, inverted abasic, inverted nucleotide or other terminal cap that is optionally present
  misc_feature (21)..(21): 3'-3 attached terminal deoxyabasic moiety, inverted abasic, inverted nucleotide or other terminal cap that is optionally present
  misc_feature (1)..(2): 2'-deoxy-2'Fluoro
  misc_feature (4)..(6): 2'-deoxy-2'Fluoro
  misc_feature (8)..(9): 2'-deoxy-2'Fluoro
  misc_feature (12)..(13): 2'-deoxy-2'Fluoro
  misc_feature (16)..(18): 2'-deoxy-2'Fluoro
  misc_feature (1)..(19): ribonucleotide unmodified or modified as described for this sequence
cugccuaucaaccggcucgtt

SEQ ID NO: 998 - DNA, 21 bp, Artificial Sequence
  Description of Artificial Sequence: Target Sequence/siNA antisense region (stab08)
  misc_feature (1)..(1): 2'-deoxy-2'Fluoro
  misc_feature (2)..(4): 2'-O-methyl
  misc_feature (5)..(6): 2'-deoxy-2'Fluoro
  misc_feature (7)..(8): 2'-O-methyl
  misc_feature (9)..(10): 2'-deoxy-2'Fluoro
  misc_feature (11)..(12): 2'-O-methyl
  misc_feature (13)..(13): 2'-deoxy-2'Fluoro
  misc_feature (14)..(16): 2'-O-methyl
  misc_feature (17)..(17): 2'-deoxy-2'Fluoro
  misc_feature (18)..(19): 2'-O-methyl
  misc_feature (20)..(20): Phosphorothioate or Phosphorodithioate 3'-Internucleotide Linkage (optionally present)
  misc_feature (1)..(19): ribonucleotide unmodified or modified as described for this sequence
cgagccgguugauaggcagtt

SEQ ID NO: 999 - DNA, 21 bp, Artificial Sequence
  Description of Artificial Sequence: Target Sequence/siNA sense region (stab09)
  misc_feature (1)..(1): 5'-3 attached terminal deoxyabasic moiety, inverted abasic, inverted nucleotide or other terminal cap that is optionally present
  misc_feature (21)..(21): 3'-3 attached terminal deoxyabasic moiety, inverted abasic, inverted nucleotide or other terminal cap that is optionally present
  misc_feature (1)..(19): ribonucleotide unmodified or modified as described for this sequence
cugccuaucaaccggcucgtt

SEQ ID NO: 1000 - DNA, 21 bp, Artificial Sequence
  Description of Artificial Sequence: Target Sequence/siNA antisense region (stab10)
  misc_feature (20)..(20): Phosphorothioate or Phosphorodithioate 3'-Internucleotide Linkage (optionally present)
  misc_feature (1)..(19): ribonucleotide unmodified or modified as described for this sequence
cgagccgguugauaggcagtt

SEQ ID NO: 1001 - DNA, 21 bp, Artificial Sequence
  Description of Artificial Sequence: Target Sequence/siNA antisense region (stab19)
  misc_feature (21)..(21): 3'-3 attached terminal deoxyabasic moiety, inverted abasic, inverted nucleotide or other terminal cap that is optionally present
  misc_feature (1)..(1): 2'-deoxy-2'Fluoro
  misc_feature (2)..(4): 2'-O-methyl
  misc_feature (5)..(6): 2'-deoxy-2'Fluoro
  misc_feature (7)..(8): 2'-O-methyl
  misc_feature (9)..(10): 2'-deoxy-2'Fluoro
  misc_feature (11)..(12): 2'-O-methyl
  misc_feature (13)..(13): 2'-deoxy-2'Fluoro
  misc_feature (14)..(16): 2'-O-methyl
  misc_feature (17)..(17): 2'-deoxy-2'Fluoro
  misc_feature (18)..(19): 2'-O-methyl
  misc_feature (1)..(19): ribonucleotide unmodified or modified as described for this sequence
cgagccgguugauaggcagtt

SEQ ID NO: 1002 - DNA, 21 bp, Artificial Sequence
  Description of Artificial Sequence: Target Sequence/siNA antisense region (stab22)
  misc_feature (21)..(21): 3'-3 attached terminal deoxyabasic moiety, inverted abasic, inverted nucleotide or other terminal cap that is optionally present
  misc_feature (20)..(20): Phosphorothioate or Phosphorodithioate 3'-Internucleotide Linkage (optionally present)
  misc_feature (1)..(19): ribonucleotide unmodified or modified as described for this sequence
cgagccgguugauaggcagtt

SEQ ID NO: 1003 - DNA, 21 bp, Artificial Sequence
  Description of Artificial Sequence: Target Sequence/siNA antisense region (stab25)
  misc_feature (4)..(4): 2'-O-methyl
  misc_feature (5)..(6): 2'-deoxy-2'Fluoro
  misc_feature (7)..(8): 2'-O-methyl
  misc_feature (9)..(10): 2'-deoxy-2'Fluoro
  misc_feature (11)..(12): 2'-O-methyl
  misc_feature (13)..(13): 2'-deoxy-2'Fluoro
  misc_feature (14)..(16): 2'-O-methyl
  misc_feature (17)..(17): 2'-deoxy-2'Fluoro
  misc_feature (18)..(19): 2'-O-methyl
  misc_feature (20)..(20): Phosphorothioate or Phosphorodithioate 3'-Internucleotide Linkage (optionally present)
  misc_feature (1). .(19): ribonucleotide unmodified or modified as described for this sequence
cgagccgguugauaggcagtt

SEQ ID NO: 1004 - RNA, 21 nt, Artificial Sequence
  Description of Artificial Sequence: Target Sequence/siNA antisense region (stab35)
  misc_feature (4)..(4): 2'-O-methyl
  misc_feature (5)..(6): 2'-deoxy-2'Fluoro
  misc_feature (7)..(8): 2'-O-methyl
  misc_feature (9)..(10): 2'-deoxy-2'Fluoro
  misc_feature (11)..(12): 2'-O-methyl
  misc_feature (13)..(13): 2'-deoxy-2'Fluoro
  misc_feature (14)..(16): 2'-O-methyl
  misc_feature (17)..(17): 2'-deoxy-2'Fluoro
  misc_feature (18)..(21): 2'-O-methyl
cgagccgguugauaggcaguu

SEQ ID NO: 1005 - RNA, 21 nt, Artificial Sequence
  Description of Artificial Sequence: Target Sequence/siNA antisense region (stab36)
  misc_feature (4)..(4): 2'-O-methyl
  misc_feature (5)..(6): 2'-deoxy-2'Fluoro
  misc_feature (7)..(8): 2'-O-methyl
  misc_feature (9)..(10): 2'-deoxy-2'Fluoro
  misc_feature (11)..(12): 2'-O-methyl
  misc_feature (13)..(13): 2'-deoxy-2'Fluoro
  misc_feature (14)..(16): 2'-O-methyl
  misc_feature (17)..(17): 2'-deoxy-2'Fluoro
  misc_feature (18)..(21): 2'-O-methyl
cgagccgguugauaggcagcu

SEQ ID NO: 1006 - RNA, 19 nt, Artificial Sequence
  Description of Artificial Sequence: Target Sequence/siNA sense region
gcagcuggcagcaaggccc

SEQ ID NO: 1007 - RNA, 19 nt, Artificial Sequence
  Description of Artificial Sequence: Target Sequence/siNA antisense region
gggccuugcugccagcugc

SEQ ID NO: 1008 - DNA, 21 bp, Artificial Sequence
  Description of Artificial Sequence: Target Sequence/siNA sense region (stab00)
  misc_feature (1)..(19): ribonucleotide unmodified or modified as described for this sequence
gcagcuggcagcaaggccctt

SEQ ID NO: 1009 - DNA, 21 bp, Artificial Sequence
  Description of Artificial Sequence: Target Sequence/siNA antisense region (stab00as)
  misc_feature (1)..(19): ribonucleotide unmodified or modified as described for this sequence
gggccuugcugccagcugctt

SEQ ID NO: 1010 - DNA, 21 bp, Artificial Sequence
  Description of Artificial Sequence: Target Sequence/siNA sense region (stab04)
  misc_feature (1)..(1): 5'-3 attached terminal deoxyabasic moiety, inverted abasic, inverted nucleotide or other terminal cap that is optionally present
  misc_feature (21)..(21): 3'-3 attached terminal deoxyabasic moiety, inverted abasic, inverted nucleotide or other terminal cap that is optionally present
  misc_feature (2)..(2): 2'-deoxy-2'Fluoro
  misc_feature (5)..(6): 2'-deoxy-2'Fluoro
  misc_feature (9)..(9): 2'-deoxy-2'Fluoro
  misc_feature (12)..(12): 2'-deoxy-2'Fluoro
  misc_feature (17)..(19): 2'-deoxy-2'Fluoro
  misc_feature (1). .(19): ribonucleotide unmodified or modified as described for this sequence
gcagcuggcagcaaggccctt

SEQ ID NO: 1011 - DNA, 21 bp, Artificial Sequence
  Description of Artificial Sequence: Target Sequence/siNA antisense region (stab05)
  misc_feature (4)..(7): 2'-deoxy-2'Fluoro
  misc_feature (9)..(10): 2'-deoxy-2'Fluoro
  misc_feature (12)..(13): 2'-deoxy-2'Fluoro
  misc_feature (16)..(17): 2'-deoxy-2'Fluoro
  misc_feature (19)..(19): 2'-deoxy-2'Fluoro
  misc_feature (20)..(20): Phosphorothioate or Phosphorodithioate 3'-Internucleotide Linkage (optionally present)
  misc_feature (1). .(19): ribonucleotide unmodified or modified as described for this sequence
gggccuugcugccagcugctt

SEQ ID NO: 1012 - DNA, 21 bp, Artificial Sequence
  Description of Artificial Sequence: Target Sequence/siNA sense region (stab07)
  misc_feature (1)..(1): 5'-3 attached terminal deoxyabasic moiety, inverted abasic, inverted nucleotide or other terminal cap that is optionally present
  misc_feature (21)..(21): 3'-3 attached terminal deoxyabasic moiety, inverted abasic, inverted nucleotide or other terminal cap that is optionally present
  misc_feature (2)..(2): 2'-deoxy-2'Fluoro
  misc_feature (5)..(6): 2'-deoxy-2'Fluoro
  misc_feature (9)..(9): 2'-deoxy-2'Fluoro
  misc_feature (12)..(12): 2'-deoxy-2'Fluoro
  misc_feature (17)..(19): 2'-deoxy-2'Fluoro
  misc_feature (1)..(19): ribonucleotide unmodified or modified as described for this sequence
gcagcuggcagcaaggccctt

SEQ ID NO: 1013 - DNA, 21 bp, Artificial Sequence
  Description of Artificial Sequence: Target Sequence/siNA antisense region (stab08)
  misc_feature (1)..(3): 2'-O-methyl
  misc_feature (4)..(7): 2'-deoxy-2'Fluoro
  misc_feature (8)..(8): 2'-O-methyl
  misc_feature (9)..(10): 2'-deoxy-2'Fluoro
  misc_feature (11)..(11): 2'-O-methyl
  misc_feature (12)..(13): 2'-deoxy-2'Fluoro
  misc_feature (14)..(15): 2'-O-methyl
  misc_feature (16)..(17): 2'-deoxy-2'Fluoro
  misc_feature (18)..(18): 2'-O-methyl
  misc_feature (19)..(19): 2'-deoxy-2'Fluoro
  misc_feature (20)..(20): Phosphorothioate or Phosphorodithioate 3'-Internucleotide Linkage (optionally present)
  misc_feature (1)..(19): ribonucleotide unmodified or modified as described for this sequence
gggccuugcugccagcugctt

SEQ ID NO: 1014 - DNA, 21 bp, Artificial Sequence
  Description of Artificial Sequence: Target Sequence/siNA sense region (stab09)
  misc_feature (1)..(1): 5'-3 attached terminal deoxyabasic moiety, inverted abasic, inverted nucleotide or other terminal cap that is optionally present
  misc_feature (21)..(21): 3'-3 attached terminal deoxyabasic moiety, inverted abasic, inverted nucleotide or other terminal cap that is optionally present
  misc_feature (1)..(19): ribonucleotide unmodified or modified as described for this sequence
gcagcuggcagcaaggccctt

SEQ ID NO: 1015 - DNA, 21 bp, Artificial Sequence
  Description of Artificial Sequence: Target Sequence/siNA antisense region (stab10)
  misc_feature (20)..(20): Phosphorothioate or Phosphorodithioate 3'-Internucleotide Linkage (optionally present)
  misc_feature (1)..(19): ribonucleotide unmodified or modified as described for this sequence
gggccuugcugccagcugctt

SEQ ID NO: 1016 - DNA, 21 bp, Artificial Sequence
  Description of Artificial Sequence: Target Sequence/siNA antisense region (stab19)
  misc_feature (21)..(21): 3'-3 attached terminal deoxyabasic moiety, inverted abasic, inverted nucleotide or other terminal cap that is optionally present
  misc_feature (1)..(3): 2'-O-methyl
  misc_feature (4)..(7): 2'-deoxy-2'Fluoro
  misc_feature (8)..(8): 2'-O-methyl
  misc_feature (9)..(10): 2'-deoxy-2'Fluoro
  misc_feature (11)..(11): 2'-O-methyl
  misc_feature (12)..(13): 2'-deoxy-2'Fluoro
  misc_feature (14)..(15): 2'-O-methyl
  misc_feature (16)..(17): 2'-deoxy-2'Fluoro
  misc_feature (18)..(18): 2'-O-methyl
  misc_feature (19)..(19): 2'-deoxy-2'Fluoro
  misc_feature (1)..(19): ribonucleotide unmodified or modified as described for this sequence
gggccuugcugccagcugctt

SEQ ID NO: 1017 - DNA, 21 bp, Artificial Sequence
  Description of Artificial Sequence: Target Sequence/siNA antisense region (stab22)
  misc_feature (21)..(21): 3'-3 attached terminal deoxyabasic moiety, inverted abasic, inverted nucleotide or other terminal cap that is optionally present
  misc_feature (20)..(20): Phosphorothioate or Phosphorodithioate 3'-Internucleotide Linkage (optionally present)
  misc_feature (1)..(19): ribonucleotide unmodified or modified as described for this sequence
gggccuugcugccagcugctt

SEQ ID NO: 1018 - DNA, 21 bp, Artificial Sequence
  Description of Artificial Sequence: Target Sequence/siNA antisense region (stab25)
  misc_feature (4)..(7): 2'-deoxy-2'Fluoro
  misc_feature (8)..(8): 2'-O-methyl
  misc_feature (9)..(10): 2'-deoxy-2'Fluoro
  misc_feature (11)..(11): 2'-O-methyl
  misc_feature (12)..(13): 2'-deoxy-2'Fluoro
  misc_feature (14)..(15): 2'-O-methyl
  misc_feature (16)..(17): 2'-deoxy-2'Fluoro
  misc_feature (18)..(18): 2'-O-methyl
  misc_feature (19)..(19): 2'-deoxy-2'Fluoro
  misc_feature (20)..(20): Phosphorothioate or Phosphorodithioate 3'-Internucleotide Linkage (optionally present)
  misc_feature (1). .(19): ribonucleotide unmodified or modified as described for this sequence
gggccuugcugccagcugctt

SEQ ID NO: 1019 - RNA, 21 nt, Artificial Sequence
  Description of Artificial Sequence: Target Sequence/siNA antisense region (stab35)
  misc_feature (4)..(7): 2'-deoxy-2'Fluoro
  misc_feature (8)..(8): 2'-O-methyl
  misc_feature (9)..(10): 2'-deoxy-2'Fluoro
  misc_feature (11)..(11): 2'-O-methyl
  misc_feature (12)..(13): 2'-deoxy-2'Fluoro
  misc_feature (14)..(15): 2'-O-methyl
  misc_feature (16)..(17): 2'-deoxy-2'Fluoro
  misc_feature (18)..(18): 2'-O-methyl
  misc_feature (19)..(19): 2'-deoxy-2'Fluoro
  misc_feature (20)..(21): 2'-O-methyl
gggccuugcugccagcugcuu

SEQ ID NO: 1020 - RNA, 21 nt, Artificial Sequence
  Description of Artificial Sequence: Target Sequence/siNA antisense region (stab36)
  misc_feature (4)..(7): 2'-deoxy-2'Fluoro
  misc_feature (8)..(8): 2'-O-methyl
  misc_feature (9)..(10): 2'-deoxy-2'Fluoro
  misc_feature (11)..(11): 2'-O-methyl
  misc_feature (12)..(13): 2'-deoxy-2'Fluoro
  misc_feature (14)..(15): 2'-O-methyl
  misc_feature (16)..(17): 2'-deoxy-2'Fluoro
  misc_feature (18)..(18): 2'-O-methyl
  misc_feature (19)..(19): 2'-deoxy-2'Fluoro
  misc_feature (20)..(21): 2'-O-methyl
gggccuugcugccagcugcga

SEQ ID NO: 1021 - RNA, 19 nt, Artificial Sequence
  Description of Artificial Sequence: Target Sequence/siNA sense region
ccggccucugcccagagcc

SEQ ID NO: 1022 - RNA, 19 nt, Artificial Sequence
  Description of Artificial Sequence: Target Sequence/siNA antisense region
ggcucugggcagaggccgg

SEQ ID NO: 1023 - DNA, 21 bp, Artificial Sequence
  Description of Artificial Sequence: Target Sequence/siNA sense region (stab00)
  misc_feature (1)..(19): ribonucleotide unmodified or modified as described for this sequence
ccggccucugcccagagcctt

SEQ ID NO: 1024 - DNA, 21 bp, Artificial Sequence
  Description of Artificial Sequence: Target Sequence/siNA antisense region (stab00as)
  misc_feature (1). .(19): ribonucleotide unmodified or modified as described for this sequence
ggcucugggcagaggccggtt

SEQ ID NO: 1025 - DNA, 21 bp, Artificial Sequence
  Description of Artificial Sequence: Target Sequence/siNA sense region (stab04)
  misc_feature (1)..(1): 5'-3 attached terminal deoxyabasic moiety, inverted abasic, inverted nucleotide or other terminal cap that is optionally present
  misc_feature (21)..(21): 3'-3 attached terminal deoxyabasic moiety, inverted abasic, inverted nucleotide or other terminal cap that is optionally present
  misc_feature (1)..(2): 2'-deoxy-2'Fluoro
  misc_feature (5)..(9): 2'-deoxy-2'Fluoro
  misc_feature (11)..(13): 2'-deoxy-2'Fluoro
  misc_feature (18)..(19): 2'-deoxy-2'Fluoro
  misc_feature (1). .(19): ribonucleotide unmodified or modified as described for this sequence
ccggccucugcccagagcctt

SEQ ID NO: 1026 - DNA, 21 bp, Artificial Sequence
  Description of Artificial Sequence: Target Sequence/siNA antisense region (stab05)
  misc_feature (3)..(6): 2'-deoxy-2'Fluoro
  misc_feature (10)..(10): 2'-deoxy-2'Fluoro
  misc_feature (16)..(17): 2'-deoxy-2'Fluoro
  misc_feature (20)..(20): Phosphorothioate or Phosphorodithioate 3'-Internucleotide Linkage (optionally present)
  misc_feature (1). .(19): ribonucleotide unmodified or modified as described for this sequence
ggcucugggcagaggccggtt

SEQ ID NO: 1027 - DNA, 21 bp, Artificial Sequence
  Description of Artificial Sequence: Target Sequence/siNA sense region (stab07)
  misc_feature (1)..(1): 5'-3 attached terminal deoxyabasic moiety, inverted abasic, inverted nucleotide or other terminal cap that is optionally present
  misc_feature (21)..(21): 3'-3 attached terminal deoxyabasic moiety, inverted abasic, inverted nucleotide or other terminal cap that is optionally present
  misc_feature (1)..(2): 2'-deoxy-2'Fluoro
  misc_feature (5)..(9): 2'-deoxy-2'Fluoro
  misc_feature (11)..(13): 2'-deoxy-2'Fluoro
  misc_feature (18)..(19): 2'-deoxy-2'Fluoro
  misc_feature (1)..(19): ribonucleotide unmodified or modified as described for this sequence
ccggccucugcccagagcctt

SEQ ID NO: 1028 - DNA, 21 bp, Artificial Sequence
  Description of Artificial Sequence: Target Sequence/siNA antisense region (stab08)
  misc_feature (1)..(2): 2'-O-methyl
  misc_feature (3)..(6): 2'-deoxy-2'Fluoro
  misc_feature (7)..(9): 2'-O-methyl
  misc_feature (10)..(10): 2'-deoxy-2'Fluoro
  misc_feature (11)..(15): 2'-O-methyl
  misc_feature (16)..(17): 2'-deoxy-2'Fluoro
  misc_feature (18)..(19): 2'-O-methyl
  misc_feature (20)..(20): Phosphorothioate or Phosphorodithioate 3'-Internucleotide Linkage (optionally present)
  misc_feature (1)..(19): ribonucleotide unmodified or modified as described for this sequence
ggcucugggcagaggccggtt

SEQ ID NO: 1029 - DNA, 21 bp, Artificial Sequence
  Description of Artificial Sequence: Target Sequence/siNA sense region (stab09)
  misc_feature (1)..(1): 5'-3 attached terminal deoxyabasic moiety, inverted abasic, inverted nucleotide or other terminal cap that is optionally present
  misc_feature (21)..(21): 3'-3 attached terminal deoxyabasic moiety, inverted abasic, inverted nucleotide or other terminal cap that is optionally present
  misc_feature (1)..(19): ribonucleotide unmodified or modified as described for this sequence
ccggccucugcccagagcctt

SEQ ID NO: 1030 - DNA, 21 bp, Artificial Sequence
  Description of Artificial Sequence: Target Sequence/siNA antisense region (stab10)
  misc_feature (20)..(20): Phosphorothioate or Phosphorodithioate 3'-Internucleotide Linkage (optionally present)
  misc_feature (1)..(19): ribonucleotide unmodified or modified as described for this sequence
ggcucugggcagaggccggtt

SEQ ID NO: 1031 - DNA, 21 bp, Artificial Sequence
  Description of Artificial Sequence: Target Sequence/siNA antisense region (stab19)
  misc_feature (21)..(21): 3'-3 attached terminal deoxyabasic moiety, inverted abasic, inverted nucleotide or other terminal cap that is optionally present
  misc_feature (1)..(2): 2'-O-methyl
  misc_feature (3)..(6): 2'-deoxy-2'Fluoro
  misc_feature (7)..(9): 2'-O-methyl
  misc_feature (10)..(10): 2'-deoxy-2'Fluoro
  misc_feature (11)..(15): 2'-O-methyl
  misc_feature (16)..(17): 2'-deoxy-2'Fluoro
  misc_feature (18)..(19): 2'-O-methyl
  misc_feature (1)..(19): ribonucleotide unmodified or modified as described for this sequence
ggcucugggcagaggccggtt

SEQ ID NO: 1032 - DNA, 21 bp, Artificial Sequence
  Description of Artificial Sequence: Target Sequence/siNA antisense region (stab22)
  misc_feature (21)..(21): 3'-3 attached terminal deoxyabasic moiety, inverted abasic, inverted nucleotide or other terminal cap that is optionally present
  misc_feature (20)..(20): Phosphorothioate or Phosphorodithioate 3'-Internucleotide Linkage (optionally present)
  misc_feature (1)..(19): ribonucleotide unmodified or modified as described for this sequence
ggcucugggcagaggccggtt

SEQ ID NO: 1033 - DNA, 21 bp, Artificial Sequence
  Description of Artificial Sequence: Target Sequence/siNA antisense region (stab25)
  misc_feature (4)..(6): 2'-deoxy-2'Fluoro
  misc_feature (7)..(9): 2'-O-methyl
  misc_feature (10)..(10): 2'-deoxy-2'Fluoro
  misc_feature (11)..(15): 2'-O-methyl
  misc_feature (16)..(17): 2'-deoxy-2'Fluoro
  misc_feature (18)..(19): 2'-O-methyl
  misc_feature (20)..(20): Phosphorothioate or Phosphorodithioate 3'-Internucleotide Linkage (optionally present)
  misc_feature (1)..(19): ribonucleotide unmodified or modified as described for this sequence
ggcucugggcagaggccggtt

SEQ ID NO: 1034 - RNA, 21 nt, Artificial Sequence
  Description of Artificial Sequence: Target Sequence/siNA antisense region (stab35)
  misc_feature (4)..(6): 2'-deoxy-2'Fluoro
  misc_feature (7)..(9): 2'-O-methyl
  misc_feature (10)..(10): 2'-deoxy-2'Fluoro
  misc_feature (11)..(15): 2'-O-methyl
  misc_feature (16)..(17): 2'-deoxy-2'Fluoro
  misc_feature (18)..(21): 2'-O-methyl
ggcucugggcagaggccgguu

SEQ ID NO: 1035 - RNA, 21 nt, Artificial Sequence
  Description of Artificial Sequence: Target Sequence/siNA antisense region (stab36)
  misc_feature (4)..(6): 2'-deoxy-2'Fluoro
  misc_feature (7)..(9): 2'-O-methyl
  misc_feature (10)..(10): 2'-deoxy-2'Fluoro
  misc_feature (11)..(15): 2'-O-methyl
  misc_feature (16)..(17): 2'-deoxy-2'Fluoro
  misc_feature (18)..(21): 2'-O-methyl
ggcucugggcagaggccgggg

SEQ ID NO: 1036 - RNA, 19 nt, Artificial Sequence
  Description of Artificial Sequence: Target Sequence/siNA sense region
cguggagagaagcgcacag

SEQ ID NO: 1037 - RNA, 19 nt, Artificial Sequence
  Description of Artificial Sequence: Target Sequence/siNA antisense region
cugugcgcuucucuccacg

SEQ ID NO: 1038 - DNA, 21 bp, Artificial Sequence
  Description of Artificial Sequence: Target Sequence/siNA sense region (stab00)
  misc_feature (1)..(19): ribonucleotide unmodified or modified as described for this sequence
cguggagagaagcgcacagtt

SEQ ID NO: 1039 - DNA, 21 bp, Artificial Sequence
  Description of Artificial Sequence: Target Sequence/siNA antisense region (stab00as)
  misc_feature (1)..(19): ribonucleotide unmodified or modified as described for this sequence
cugugcgcuucucuccacgtt

SEQ ID NO: 1040 - DNA, 21 bp, Artificial Sequence
  Description of Artificial Sequence: Target Sequence/siNA sense region (stab04)
  misc_feature (1)..(1): 5'-3 attached terminal deoxyabasic moiety, inverted abasic, inverted nucleotide or other terminal cap that is optionally present
  misc_feature (21)..(21): 3'-3 attached terminal deoxyabasic moiety, inverted abasic, inverted nucleotide or other terminal cap that is optionally present
  misc_feature (1)..(1): 2'-deoxy-2'Fluoro
  misc_feature (3)..(3): 2'-deoxy-2'Fluoro
  misc_feature (13)..(13): 2'-deoxy-2'Fluoro
  misc_feature (15)..(15): 2'-deoxy-2'Fluoro
  misc_feature (17)..(17): 2'-deoxy-2'Fluoro
  misc_feature (1). .(19): ribonucleotide unmodified or modified as described for this sequence
cguggagagaagcgcacagtt

SEQ ID NO: 1041 - DNA, 21 bp, Artificial Sequence
  Description of Artificial Sequence: Target Sequence/siNA antisense region (stab05)
  misc_feature (1)..(2): 2'-deoxy-2'Fluoro
  misc_feature (4)..(4): 2'-deoxy-2'Fluoro
  misc_feature (6)..(6): 2'-deoxy-2'Fluoro
  misc_feature (8)..(16): 2'-deoxy-2'Fluoro
  misc_feature (18)..(18): 2'-deoxy-2'Fluoro
  misc_feature (20)..(20): Phosphorothioate or Phosphorodithioate 3'-Internucleotide Linkage (optionally present)
  misc_feature (1). .(19): ribonucleotide unmodified or modified as described for this sequence
cugugcgcuucucuccacgtt

SEQ ID NO: 1042 - DNA, 21 bp, Artificial Sequence
  Description of Artificial Sequence: Target Sequence/siNA sense region (stab07)
  misc_feature (1)..(1): 5'-3 attached terminal deoxyabasic moiety, inverted abasic, inverted nucleotide or other terminal cap that is optionally present
  misc_feature (21)..(21): 3'-3 attached terminal deoxyabasic moiety, inverted abasic, inverted nucleotide or other terminal cap that is optionally present
  misc_feature (1)..(1): 2'-deoxy-2'Fluoro
  misc_feature (3)..(3): 2'-deoxy-2'Fluoro
  misc_feature (13)..(13): 2'-deoxy-2'Fluoro
  misc_feature (15)..(15): 2'-deoxy-2'Fluoro
  misc_feature (17)..(17): 2'-deoxy-2'Fluoro
  misc_feature (1)..(19): ribonucleotide unmodified or modified as described for this sequence
cguggagagaagcgcacagtt

SEQ ID NO: 1043 - DNA, 21 bp, Artificial Sequence
  Description of Artificial Sequence: Target Sequence/siNA antisense region (stab08)
  misc_feature (1)..(2): 2'-deoxy-2'Fluoro
  misc_feature (3)..(3): 2'-O-methyl
  misc_feature (4)..(4): 2'-deoxy-2'Fluoro
  misc_feature (5)..(5): 2'-O-methyl
  misc_feature (6)..(6): 2'-deoxy-2'Fluoro
  misc_feature (7)..(7): 2'-O-methyl
  misc_feature (8)..(16): 2'-deoxy-2'Fluoro
  misc_feature (17)..(17): 2'-O-methyl
  misc_feature (18)..(18): 2'-deoxy-2'Fluoro
  misc_feature (19)..(19): 2'-O-methyl
  misc_feature (20)..(20): Phosphorothioate or Phosphorodithioate 3'-Internucleotide Linkage (optionally present)
  misc_feature (1)..(19): ribonucleotide unmodified or modified as described for this sequence
cugugcgcuucucuccacgtt

SEQ ID NO: 1044 - DNA, 21 bp, Artificial Sequence
  Description of Artificial Sequence: Target Sequence/siNA sense region (stab09)
  misc_feature (1)..(1): 5'-3 attached terminal deoxyabasic moiety, inverted abasic, inverted nucleotide or other terminal cap that is optionally present
  misc_feature (21)..(21): 3'-3 attached terminal deoxyabasic moiety, inverted abasic, inverted nucleotide or other terminal cap that is optionally present
  misc_feature (1)..(19): ribonucleotide unmodified or modified as described for this sequence
cguggagagaagcgcacagtt

SEQ ID NO: 1045 - DNA, 21 bp, Artificial Sequence
  Description of Artificial Sequence: Target Sequence/siNA antisense region (stab10)
  misc_feature (20)..(20): Phosphorothioate or Phosphorodithioate 3'-Internucleotide Linkage (optionally present)
  misc_feature (1)..(19): ribonucleotide unmodified or modified as described for this sequence
cugugcgcuucucuccacgtt

SEQ ID NO: 1046 - DNA, 21 bp, Artificial Sequence
  Description of Artificial Sequence: Target Sequence/siNA antisense region (stab19)
  misc_feature (21)..(21): 3'-3 attached terminal deoxyabasic moiety, inverted abasic, inverted nucleotide or other terminal cap that is optionally present
  misc_feature (1)..(2): 2'-deoxy-2'Fluoro
  misc_feature (3)..(3): 2'-O-methyl
  misc_feature (4)..(4): 2'-deoxy-2'Fluoro
  misc_feature (5)..(5): 2'-O-methyl
  misc_feature (6)..(6): 2'-deoxy-2'Fluoro
  misc_feature (7)..(7): 2'-O-methyl
  misc_feature (8)..(16): 2'-deoxy-2'Fluoro
  misc_feature (17)..(17): 2'-O-methyl
  misc_feature (18)..(18): 2'-deoxy-2'Fluoro
  misc_feature (19)..(19): 2'-O-methyl
  misc_feature (1)..(19): ribonucleotide unmodified or modified as described for this sequence
cugugcgcuucucuccacgtt

SEQ ID NO: 1047 - DNA, 21 bp, Artificial Sequence
  Description of Artificial Sequence: Target Sequence/siNA antisense region (stab22)
  misc_feature (21)..(21): 3'-3 attached terminal deoxyabasic moiety, inverted abasic, inverted nucleotide or other terminal cap that is optionally present
  misc_feature (20)..(20): Phosphorothioate or Phosphorodithioate 3'-Internucleotide Linkage (optionally present)
  misc_feature (1)..(19): ribonucleotide unmodified or modified as described for this sequence
cugugcgcuucucuccacgtt

SEQ ID NO: 1048 - DNA, 21 bp, Artificial Sequence
  Description of Artificial Sequence: Target Sequence/siNA antisense region (stab25)
  misc_feature (4)..(4): 2'-deoxy-2'Fluoro
  misc_feature (5)..(5): 2'-O-methyl
  misc_feature (6)..(6): 2'-deoxy-2'Fluoro
  misc_feature (7)..(7): 2'-O-methyl
  misc_feature (8)..(16): 2'-deoxy-2'Fluoro
  misc_feature (17)..(17): 2'-O-methyl
  misc_feature (18)..(18): 2'-deoxy-2'Fluoro
  misc_feature (19)..(19): 2'-O-methyl
  misc_feature (20)..(20): Phosphorothioate or Phosphorodithioate 3'-Internucleotide Linkage (optionally present)
  misc_feature (1)..(19): ribonucleotide unmodified or modified as described for this sequence
cugugcgcuucucuccacgtt

SEQ ID NO: 1049 - RNA, 21 nt, Artificial Sequence
  Description of Artificial Sequence: Target Sequence/siNA antisense region (stab35)
  misc_feature (4)..(4): 2'-deoxy-2'Fluoro
  misc_feature (5)..(5): 2'-O-methyl
  misc_feature (6)..(6): 2'-deoxy-2'Fluoro
  misc_feature (7)..(7): 2'-O-methyl
  misc_feature (8)..(16): 2'-deoxy-2'Fluoro
  misc_feature (17)..(17): 2'-O-methyl
  misc_feature (18)..(18): 2'-deoxy-2'Fluoro
  misc_feature (19)..(21): 2'-O-methyl
cugugcgcuucucuccacguu

SEQ ID NO: 1050 - RNA, 21 nt, Artificial Sequence
  Description of Artificial Sequence: Target Sequence/siNA antisense region (stab36)
  misc_feature (4)..(4): 2'-deoxy-2'Fluoro
  misc_feature (5)..(5): 2'-O-methyl
  misc_feature (6)..(6): 2'-deoxy-2'Fluoro
  misc_feature (7)..(7): 2'-O-methyl
  misc_feature (8)..(16): 2'-deoxy-2'Fluoro
  misc_feature (17)..(17): 2'-O-methyl
  misc_feature (18)..(18): 2'-deoxy-2'Fluoro
  misc_feature (19)..(21): 2'-O-methyl
cugugcgcuucucuccacggc

SEQ ID NO: 1051 - RNA, 19 nt, Artificial Sequence
  Description of Artificial Sequence: Target Sequence/siNA sense region
gcccacaacgccauugaga

SEQ ID NO: 1052 - RNA, 19 nt, Artificial Sequence
  Description of Artificial Sequence: Target Sequence/siNA antisense region
ucucaauggcguugugggc

SEQ ID NO: 1053 - DNA, 21 bp, Artificial Sequence
  Description of Artificial Sequence: Target Sequence/siNA sense region (stab00)
  misc_feature (1)..(19): ribonucleotide unmodified or modified as described for this sequence
gcccacaacgccauugagatt

SEQ ID NO: 1054 - DNA, 21 bp, Artificial Sequence
  Description of Artificial Sequence: Target Sequence/siNA antisense region (stab00as)
  misc_feature (1). .(19): ribonucleotide unmodified or modified as described for this sequence
ucucaauggcguugugggctt

SEQ ID NO: 1055 - DNA, 21 bp, Artificial Sequence
  Description of Artificial Sequence: Target Sequence/siNA sense region (stab04)
  misc_feature (1)..(1): 5'-3 attached terminal deoxyabasic moiety, inverted abasic, inverted nucleotide or other terminal cap that is optionally present
  misc_feature (21)..(21): 3'-3 attached terminal deoxyabasic moiety, inverted abasic, inverted nucleotide or other terminal cap that is optionally present
  misc_feature (2)..(4): 2'-deoxy-2'Fluoro
  misc_feature (6)..(6): 2'-deoxy-2'Fluoro
  misc_feature (9)..(9): 2'-deoxy-2'Fluoro
  misc_feature (11)..(12): 2'-deoxy-2'Fluoro
  misc_feature (14)..(15): 2'-deoxy-2'Fluoro
  misc_feature (1). .(19): ribonucleotide unmodified or modified as described for this sequence
gcccacaacgccauugagatt

SEQ ID NO: 1056 - DNA, 21 bp, Artificial Sequence
  Description of Artificial Sequence: Target Sequence/siNA antisense region (stab05)
  misc_feature (1)..(4): 2'-deoxy-2'Fluoro
  misc_feature (7)..(7): 2'-deoxy-2'Fluoro
  misc_feature (10)..(10): 2'-deoxy-2'Fluoro
  misc_feature (12)..(13): 2'-deoxy-2'Fluoro
  misc_feature (15)..(15): 2'-deoxy-2'Fluoro
  misc_feature (19)..(19): 2'-deoxy-2'Fluoro
  misc_feature (20)..(20): Phosphorothioate or Phosphorodithioate 3'-Internucleotide Linkage (optionally present)
  misc_feature (1). .(19): ribonucleotide unmodified or modified as described for this sequence
ucucaauggcguugugggctt

SEQ ID NO: 1057 - DNA, 21 bp, Artificial Sequence
  Description of Artificial Sequence: Target Sequence/siNA sense region (stab07)
  misc_feature (1)..(1): 5'-3 attached terminal deoxyabasic moiety, inverted abasic, inverted nucleotide or other terminal cap that is optionally present
  misc_feature (21)..(21): 3'-3 attached terminal deoxyabasic moiety, inverted abasic, inverted nucleotide or other terminal cap that is optionally present
  misc_feature (2)..(4): 2'-deoxy-2'Fluoro
  misc_feature (6)..(6): 2'-deoxy-2'Fluoro
  misc_feature (9)..(9): 2'-deoxy-2'Fluoro
  misc_feature (11)..(12): 2'-deoxy-2'Fluoro
  misc_feature (14)..(15): 2'-deoxy-2'Fluoro
gcccacaacgccauugagatt

SEQ ID NO: 1058 - DNA, 21 bp, Artificial Sequence
  Description of Artificial Sequence: Target Sequence/siNA antisense region (stab08)
  misc_feature (1)..(4): 2'-deoxy-2'Fluoro
  misc_feature (5)..(6): 2'-O-methyl
  misc_feature (7)..(7): 2'-deoxy-2'Fluoro
  misc_feature (8)..(9): 2'-O-methyl
  misc_feature (10)..(10): 2'-deoxy-2'Fluoro
  misc_feature (11)..(11): 2'-O-methyl
  misc_feature (12)..(13): 2'-deoxy-2'Fluoro
  misc_feature (14)..(14): 2'-O-methyl
  misc_feature (15)..(15): 2'-deoxy-2'Fluoro
  misc_feature (16)..(18): 2'-O-methyl
  misc_feature (19)..(19): 2'-deoxy-2'Fluoro
  misc_feature (20)..(20): Phosphorothioate or Phosphorodithioate 3'-Internucleotide Linkage (optionally present)
ucucaauggcguugugggctt

SEQ ID NO: 1059 - DNA, 21 bp, Artificial Sequence
  Description of Artificial Sequence: Target Sequence/siNA sense region (stab09)
  misc_feature (1)..(1): 5'-3 attached terminal deoxyabasic moiety, inverted abasic, inverted nucleotide or other terminal cap that is optionally present
  misc_feature (21)..(21): 3'-3 attached terminal deoxyabasic moiety, inverted abasic, inverted nucleotide or other terminal cap that is optionally present
  misc_feature (1)..(19): ribonucleotide unmodified or modified as described for this sequence
gcccacaacgccauugagatt

SEQ ID NO: 1060 - DNA, 21 bp, Artificial Sequence
  Description of Artificial Sequence: Target Sequence/siNA antisense region (stab10)
  misc_feature (20)..(20): Phosphorothioate or Phosphorodithioate 3'-Internucleotide Linkage (optionally present)
  misc_feature (1)..(19): ribonucleotide unmodified or modified as described for this sequence
ucucaauggcguugugggctt

SEQ ID NO: 1061 - DNA, 21 bp, Artificial Sequence
  Description of Artificial Sequence: Target Sequence/siNA antisense region (stab19)
  misc_feature (21)..(21): 3'-3 attached terminal deoxyabasic moiety, inverted abasic, inverted nucleotide or other terminal cap that is optionally present
  misc_feature (1)..(4): 2'-deoxy-2'Fluoro
  misc_feature (5)..(6): 2'-O-methyl
  misc_feature (7)..(7): 2'-deoxy-2'Fluoro
  misc_feature (8)..(9): 2'-O-methyl
  misc_feature (10)..(10): 2'-deoxy-2'Fluoro
  misc_feature (11)..(11): 2'-O-methyl
  misc_feature (12)..(13): 2'-deoxy-2'Fluoro
  misc_feature (14)..(14): 2'-O-methyl
  misc_feature (15)..(15): 2'-deoxy-2'Fluoro
  misc_feature (16)..(18): 2'-O-methyl
  misc_feature (19)..(19): 2'-deoxy-2'Fluoro
  misc_feature (1)..(19): ribonucleotide unmodified or modified as described for this sequence
ucucaauggcguugugggctt

SEQ ID NO: 1062 - DNA, 21 bp, Artificial Sequence
  Description of Artificial Sequence: Target Sequence/siNA antisense region (stab22)
  misc_feature (21)..(21): 3'-3 attached terminal deoxyabasic moiety, inverted abasic, inverted nucleotide or other terminal cap that is optionally present
  misc_feature (20)..(20): Phosphorothioate or Phosphorodithioate 3'-Internucleotide Linkage (optionally present)
  misc_feature (1)..(19): ribonucleotide unmodified or modified as described for this sequence
ucucaauggcguugugggctt

SEQ ID NO: 1063 - DNA, 21 bp, Artificial Sequence
  Description of Artificial Sequence: Target Sequence/siNA antisense region (stab25)
  misc_feature (4)..(4): 2'-deoxy-2'Fluoro
  misc_feature (5)..(6): 2'-O-methyl
  misc_feature (7)..(7): 2'-deoxy-2'Fluoro
  misc_feature (8)..(9): 2'-O-methyl
  misc_feature (10)..(10): 2'-deoxy-2'Fluoro
  misc_feature (11)..(11): 2'-O-methyl
  misc_feature (12)..(13): 2'-deoxy-2'Fluoro
  misc_feature (14)..(14): 2'-O-methyl
  misc_feature (15)..(15): 2'-deoxy-2'Fluoro
  misc_feature (16)..(18): 2'-O-methyl
  misc_feature (19)..(19): 2'-deoxy-2'Fluoro
  misc_feature (20)..(20): Phosphorothioate or Phosphorodithioate 3'-Internucleotide Linkage (optionally present)
  misc_feature (1). .(19): ribonucleotide unmodified or modified as described for this sequence
ucucaauggcguugugggctt

SEQ ID NO: 1064 - RNA, 21 nt, Artificial Sequence
  Description of Artificial Sequence: Target Sequence/siNA antisense region (stab35)
  misc_feature (4)..(4): 2'-deoxy-2'Fluoro
  misc_feature (5)..(6): 2'-O-methyl
  misc_feature (7)..(7): 2'-deoxy-2'Fluoro
  misc_feature (8)..(9): 2'-O-methyl
  misc_feature (10)..(10): 2'-deoxy-2'Fluoro
  misc_feature (11)..(11): 2'-O-methyl
  misc_feature (12)..(13): 2'-deoxy-2'Fluoro
  misc_feature (14)..(14): 2'-O-methyl
  misc_feature (15)..(15): 2'-deoxy-2'Fluoro
  misc_feature (16)..(18): 2'-O-methyl
  misc_feature (19)..(19): 2'-deoxy-2'Fluoro
  misc_feature (20)..(21): 2'-O-methyl
ucucaauggcguugugggcuu

SEQ ID NO: 1065 - RNA, 21 nt, Artificial Sequence
  Description of Artificial Sequence: Target Sequence/siNA antisense region (stab36)
  misc_feature (4)..(4): 2'-deoxy-2'Fluoro
  misc_feature (5)..(6): 2'-O-methyl
  misc_feature (7)..(7): 2'-deoxy-2'Fluoro
  misc_feature (8)..(9): 2'-O-methyl
  misc_feature (10)..(10): 2'-deoxy-2'Fluoro
  misc_feature (11)..(11): 2'-O-methyl
  misc_feature (12)..(13): 2'-deoxy-2'Fluoro
  misc_feature (14)..(14): 2'-O-methyl
  misc_feature (15)..(15): 2'-deoxy-2'Fluoro
  misc_feature (16)..(18): 2'-O-methyl
  misc_feature (19)..(19): 2'-deoxy-2'Fluoro
  misc_feature (20)..(21): 2'-O-methyl
ucucaauggcguugugggcug

SEQ ID NO: 1066 - RNA, 19 nt, Artificial Sequence
  Description of Artificial Sequence: Target Sequence/siNA sense region
aagcgcuaccgcuccucca

SEQ ID NO: 1067 - RNA, 19 nt, Artificial Sequence
  Description of Artificial Sequence: Target Sequence/siNA antisense region
uggaggagcgguagcgcuu

SEQ ID NO: 1068 - DNA, 21 bp, Artificial Sequence
  Description of Artificial Sequence: Target Sequence/siNA sense region (stab00)
  misc_feature (1)..(19): ribonucleotide unmodified or modified as described for this sequence
aagcgcuaccgcuccuccatt

SEQ ID NO: 1069 - DNA, 21 bp, Artificial Sequence
  Description of Artificial Sequence: Target Sequence/siNA antisense region (stab00as)
  misc_feature (1)..(19): ribonucleotide unmodified or modified as described for this sequence
uggaggagcgguagcgcuutt

SEQ ID NO: 1070 - DNA, 21 bp, Artificial Sequence
  Description of Artificial Sequence: Target Sequence/siNA sense region (stab04)
  misc_feature (1)..(1): 5'-3 attached terminal deoxyabasic moiety, inverted abasic, inverted nucleotide or other terminal cap that is optionally present
  misc_feature (21)..(21): 3'-3 attached terminal deoxyabasic moiety, inverted abasic, inverted nucleotide or other terminal cap that is optionally present
  misc_feature (4)..(4): 2'-deoxy-2'Fluoro
  misc_feature (6)..(7): 2'-deoxy-2'Fluoro
  misc_feature (9)..(10): 2'-deoxy-2'Fluoro
  misc_feature (12)..(18): 2'-deoxy-2'Fluoro
  misc_feature (1). .(19): ribonucleotide unmodified or modified as described for this sequence
aagcgcuaccgcuccuccatt

SEQ ID NO: 1071 - DNA, 21 bp, Artificial Sequence
  Description of Artificial Sequence: Target Sequence/siNA antisense region (stab05)
  misc_feature (1)..(1): 2'-deoxy-2'Fluoro
  misc_feature (9)..(9): 2'-deoxy-2'Fluoro
  misc_feature (12)..(12): 2'-deoxy-2'Fluoro
  misc_feature (15)..(15): 2'-deoxy-2'Fluoro
  misc_feature (17)..(19): 2'-deoxy-2'Fluoro
  misc_feature (20)..(20): Phosphorothioate or Phosphorodithioate 3'-Internucleotide Linkage (optionally present)
  misc_feature (1). .(19): ribonucleotide unmodified or modified as described for this sequence
uggaggagcgguagcgcuutt

SEQ ID NO: 1072 - DNA, 21 bp, Artificial Sequence
  Description of Artificial Sequence: Target Sequence/siNA sense region (stab07)
  misc_feature (1)..(1): 5'-3 attached terminal deoxyabasic moiety, inverted abasic, inverted nucleotide or other terminal cap that is optionally present
  misc_feature (21)..(21): 3'-3 attached terminal deoxyabasic moiety, inverted abasic, inverted nucleotide or other terminal cap that is optionally present
  misc_feature (4)..(4): 2'-deoxy-2'Fluoro
  misc_feature (6)..(7): 2'-deoxy-2'Fluoro
  misc_feature (9)..(10): 2'-deoxy-2'Fluoro
  misc_feature (12)..(18): 2'-deoxy-2'Fluoro
  misc_feature (1)..(19): ribonucleotide unmodified or modified as described for this sequence
aagcgcuaccgcuccuccatt

SEQ ID NO: 1073 - DNA, 21 bp, Artificial Sequence
  Description of Artificial Sequence: Target Sequence/siNA antisense region (stab08)
  misc_feature (1)..(1): 2'-deoxy-2'Fluoro
  misc_feature (2)..(8): 2'-O-methyl
  misc_feature (9)..(9): 2'-deoxy-2'Fluoro
  misc_feature (10)..(11): 2'-O-methyl
  misc_feature (12)..(12): 2'-deoxy-2'Fluoro
  misc_feature (13)..(14): 2'-O-methyl
  misc_feature (15)..(15): 2'-deoxy-2'Fluoro
  misc_feature (16)..(16): 2'-O-methyl
  misc_feature (17)..(19): 2'-deoxy-2'Fluoro
  misc_feature (20)..(20): Phosphorothioate or Phosphorodithioate 3'-Internucleotide Linkage (optionally present)
  misc_feature (1)..(19): ribonucleotide unmodified or modified as described for this sequence
uggaggagcgguagcgcuutt

SEQ ID NO: 1074 - DNA, 21 bp, Artificial Sequence
  Description of Artificial Sequence: Target Sequence/siNA sense region (stab09)
  misc_feature (1)..(1): 5'-3 attached terminal deoxyabasic moiety, inverted abasic, inverted nucleotide or other terminal cap that is optionally present
  misc_feature (21)..(21): 3'-3 attached terminal deoxyabasic moiety, inverted abasic, inverted nucleotide or other terminal cap that is optionally present
  misc_feature (1)..(19): ribonucleotide unmodified or modified as described for this sequence
aagcgcuaccgcuccuccatt

SEQ ID NO: 1075 - DNA, 21 bp, Artificial Sequence
  Description of Artificial Sequence: Target Sequence/siNA antisense region (stab10)
  misc_feature (20)..(20): Phosphorothioate or Phosphorodithioate 3'-Internucleotide Linkage (optionally present)
  misc_feature (1). .(19): ribonucleotide unmodified or modified as described for this sequence
uggaggagcgguagcgcuutt

SEQ ID NO: 1076 - DNA, 21 bp, Artificial Sequence
  Description of Artificial Sequence: Target Sequence/siNA antisense region (stab19)
  misc_feature (21)..(21): 3'-3 attached terminal deoxyabasic moiety, inverted abasic, inverted nucleotide or other terminal cap that is optionally present
  misc_feature (1)..(1): 2'-deoxy-2'Fluoro
  misc_feature (2)..(8): 2'-O-methyl
  misc_feature (9)..(9): 2'-deoxy-2'Fluoro
  misc_feature (10)..(11): 2'-O-methyl
  misc_feature (12)..(12): 2'-deoxy-2'Fluoro
  misc_feature (13)..(14): 2'-O-methyl
  misc_feature (15)..(15): 2'-deoxy-2'Fluoro
  misc_feature (16)..(16): 2'-O-methyl
  misc_feature (17)..(19): 2'-deoxy-2'Fluoro
  misc_feature (1)..(19): ribonucleotide unmodified or modified as described for this sequence
uggaggagcgguagcgcuutt

SEQ ID NO: 1077 - DNA, 21 bp, Artificial Sequence
  Description of Artificial Sequence: Target Sequence/siNA antisense region (stab22)
  misc_feature (21)..(21): 3'-3 attached terminal deoxyabasic moiety, inverted abasic, inverted nucleotide or other terminal cap that is optionally present
  misc_feature (20)..(20): Phosphorothioate or Phosphorodithioate 3'-Internucleotide Linkage (optionally present)
  misc_feature (1)..(19): ribonucleotide unmodified or modified as described for this sequence
uggaggagcgguagcgcuutt

SEQ ID NO: 1078 - DNA, 21 bp, Artificial Sequence
  Description of Artificial Sequence: Target Sequence/siNA antisense region (stab25)
  misc_feature (4)..(8): 2'-O-methyl
  misc_feature (9)..(9): 2'-deoxy-2'Fluoro
  misc_feature (10)..(11): 2'-O-methyl
  misc_feature (12)..(12): 2'-deoxy-2'Fluoro
  misc_feature (13)..(14): 2'-O-methyl
  misc_feature (15)..(15): 2'-deoxy-2'Fluoro
  misc_feature (16)..(16): 2'-O-methyl
  misc_feature (17)..(19): 2'-deoxy-2'Fluoro
  misc_feature (20)..(20): Phosphorothioate or Phosphorodithioate 3'-Internucleotide Linkage (optionally present)
  misc_feature (1). .(19): ribonucleotide unmodified or modified as described for this sequence
uggaggagcgguagcgcuutt

SEQ ID NO: 1079 - RNA, 21 nt, Artificial Sequence
  Description of Artificial Sequence: Target Sequence/siNA antisense region (stab35)
  misc_feature (4)..(8): 2'-O-methyl
  misc_feature (9)..(9): 2'-deoxy-2'Fluoro
  misc_feature (10)..(11): 2'-O-methyl
  misc_feature (12)..(12): 2'-deoxy-2'Fluoro
  misc_feature (13)..(14): 2'-O-methyl
  misc_feature (15)..(15): 2'-deoxy-2'Fluoro
  misc_feature (16)..(16): 2'-O-methyl
  misc_feature (17)..(19): 2'-deoxy-2'Fluoro
  misc_feature (20)..(21): 2'-O-methyl
uggaggagcgguagcgcuuuu

SEQ ID NO: 1080 - RNA, 21 nt, Artificial Sequence
  Description of Artificial Sequence: Target Sequence/siNA antisense region (stab36)
  misc_feature (4)..(8): 2'-O-methyl
  misc_feature (9)..(9): 2'-deoxy-2'Fluoro
  misc_feature (10)..(11): 2'-O-methyl
  misc_feature (12)..(12): 2'-deoxy-2'Fluoro
  misc_feature (13)..(14): 2'-O-methyl
  misc_feature (15)..(15): 2'-deoxy-2'Fluoro
  misc_feature (16)..(16): 2'-O-methyl
  misc_feature (17)..(19): 2'-deoxy-2'Fluoro
  misc_feature (20)..(21): 2'-O-methyl
uggaggagcgguagcgcuucu

SEQ ID NO: 1081 - RNA, 19 nt, Artificial Sequence
  Description of Artificial Sequence: Target Sequence/siNA sense region
aucaaugacaaaaucauug

SEQ ID NO: 1082 - RNA, 19 nt, Artificial Sequence
  Description of Artificial Sequence: Target Sequence/siNA antisense region
caaugauuuugucauugau

SEQ ID NO: 1083 - DNA, 21 bp, Artificial Sequence
  Description of Artificial Sequence: Target Sequence/siNA sense region (stab00)
  misc_feature (1)..(19): ribonucleotide unmodified or modified as described for this sequence
aucaaugacaaaaucauugtt

SEQ ID NO: 1084 - DNA, 21 bp, Artificial Sequence
  Description of Artificial Sequence: Target Sequence/siNA antisense region (stab00as)
  misc_feature (1)..(19): ribonucleotide unmodified or modified as described for this sequence
caaugauuuugucauugautt

SEQ ID NO: 1085 - DNA, 21 bp, Artificial Sequence
  Description of Artificial Sequence: Target Sequence/siNA sense region (stab04)
  misc_feature (1)..(1): 5'-3 attached terminal deoxyabasic moiety, inverted abasic, inverted nucleotide or other terminal cap that is optionally present
  misc_feature (21)..(21): 3'-3 attached terminal deoxyabasic moiety, inverted abasic, inverted nucleotide or other terminal cap that is optionally present
  misc_feature (2)..(3): 2'-deoxy-2'Fluoro
  misc_feature (6)..(6): 2'-deoxy-2'Fluoro
  misc_feature (9)..(9): 2'-deoxy-2'Fluoro
  misc_feature (14)..(15): 2'-deoxy-2'Fluoro
  misc_feature (17)..(18): 2'-deoxy-2'Fluoro
  misc_feature (1). .(19): ribonucleotide unmodified or modified as described for this sequence
aucaaugacaaaaucauugtt

SEQ ID NO: 1086 - DNA, 21 bp, Artificial Sequence
  Description of Artificial Sequence: Target Sequence/siNA antisense region (stab05)
  misc_feature (1)..(1): 2'-deoxy-2'Fluoro
  misc_feature (4)..(4): 2'-deoxy-2'Fluoro
  misc_feature (7)..(10): 2'-deoxy-2'Fluoro
  misc_feature (12)..(13): 2'-deoxy-2'Fluoro
  misc_feature (15)..(16): 2'-deoxy-2'Fluoro
  misc_feature (19)..(19): 2'-deoxy-2'Fluoro
  misc_feature (20)..(20): Phosphorothioate or Phosphorodithioate 3'-Internucleotide Linkage (optionally present)
  misc_feature (1). .(19): ribonucleotide unmodified or modified as described for this sequence
caaugauuuugucauugautt

SEQ ID NO: 1087 - DNA, 21 bp, Artificial Sequence
  Description of Artificial Sequence: Target Sequence/siNA sense region (stab07)
  misc_feature (1)..(1): 5'-3 attached terminal deoxyabasic moiety, inverted abasic, inverted nucleotide or other terminal cap that is optionally present
  misc_feature (21)..(21): 3'-3 attached terminal deoxyabasic moiety, inverted abasic, inverted nucleotide or other terminal cap that is optionally present
  misc_feature (2)..(3): 2'-deoxy-2'Fluoro
  misc_feature (6)..(6): 2'-deoxy-2'Fluoro
  misc_feature (9)..(9): 2'-deoxy-2'Fluoro
  misc_feature (14)..(15): 2'-deoxy-2'Fluoro
  misc_feature (17)..(18): 2'-deoxy-2'Fluoro
  misc_feature (1)..(19): ribonucleotide unmodified or modified as described for this sequence
aucaaugacaaaaucauugtt

SEQ ID NO: 1088 - DNA, 21 bp, Artificial Sequence
  Description of Artificial Sequence: Target Sequence/siNA antisense region (stab08)
  misc_feature (1)..(1): 2'-deoxy-2'Fluoro
  misc_feature (2)..(3): 2'-O-methyl
  misc_feature (4)..(4): 2'-deoxy-2'Fluoro
  misc_feature (5)..(6): 2'-O-methyl
  misc_feature (7)..(10): 2'-deoxy-2'Fluoro
  misc_feature (11)..(11): 2'-O-methyl
  misc_feature (12)..(13): 2'-deoxy-2'Fluoro
  misc_feature (14)..(14): 2'-O-methyl
  misc_feature (15)..(16): 2'-deoxy-2'Fluoro
  misc_feature (17)..(18): 2'-O-methyl
  misc_feature (19)..(19): 2'-deoxy-2'Fluoro
  misc_feature (20)..(20): Phosphorothioate or Phosphorodithioate 3'-Internucleotide Linkage (optionally present)
  misc_feature (1)..(19): ribonucleotide unmodified or modified as described for this sequence
caaugauuuugucauugautt

SEQ ID NO: 1089 - DNA, 21 bp, Artificial Sequence
  Description of Artificial Sequence: Target Sequence/siNA sense region (stab09)
  misc_feature (1)..(1): 5'-3 attached terminal deoxyabasic moiety, inverted abasic, inverted nucleotide or other terminal cap that is optionally present
  misc_feature (21)..(21): 3'-3 attached terminal deoxyabasic moiety, inverted abasic, inverted nucleotide or other terminal cap that is optionally present
  misc_feature (1)..(19): ribonucleotide unmodified or modified as described for this sequence
aucaaugacaaaaucauugtt

SEQ ID NO: 1090 - DNA, 21 bp, Artificial Sequence
  Description of Artificial Sequence: Target Sequence/siNA antisense region (stab10)
  misc_feature (20)..(20): Phosphorothioate or Phosphorodithioate 3'-Internucleotide Linkage (optionally present)
  misc_feature (1)..(19): ribonucleotide unmodified or modified as described for this sequence
caaugauuuugucauugautt

SEQ ID NO: 1091 - DNA, 21 bp, Artificial Sequence
  Description of Artificial Sequence: Target Sequence/siNA antisense region (stab19)
  misc_feature (21)..(21): 3'-3 attached terminal deoxyabasic moiety, inverted abasic, inverted nucleotide or other terminal cap that is optionally present
  misc_feature (1)..(1): 2'-deoxy-2'Fluoro
  misc_feature (2)..(3): 2'-O-methyl
  misc_feature (4)..(4): 2'-deoxy-2'Fluoro
  misc_feature (5)..(6): 2'-O-methyl
  misc_feature (7)..(10): 2'-deoxy-2'Fluoro
  misc_feature (11)..(11): 2'-O-methyl
  misc_feature (12)..(13): 2'-deoxy-2'Fluoro
  misc_feature (14)..(14): 2'-O-methyl
  misc_feature (15)..(16): 2'-deoxy-2'Fluoro
  misc_feature (17)..(18): 2'-O-methyl
  misc_feature (19)..(19): 2'-deoxy-2'Fluoro
  misc_feature (1)..(19): ribonucleotide unmodified or modified as described for this sequence
caaugauuuugucauugautt

SEQ ID NO: 1092 - DNA, 21 bp, Artificial Sequence
  Description of Artificial Sequence: Target Sequence/siNA antisense region (stab22)
  misc_feature (21)..(21): 3'-3 attached terminal deoxyabasic moiety, inverted abasic, inverted nucleotide or other terminal cap that is optionally present
  misc_feature (20)..(20): Phosphorothioate or Phosphorodithioate 3'-Internucleotide Linkage (optionally present)
  misc_feature (1)..(19): ribonucleotide unmodified or modified as described for this sequence
caaugauuuugucauugautt

SEQ ID NO: 1093 - DNA, 21 bp, Artificial Sequence
  Description of Artificial Sequence: Target Sequence/siNA antisense region (stab25)
  misc_feature (4)..(4): 2'-deoxy-2'Fluoro
  misc_feature (5)..(6): 2'-O-methyl
  misc_feature (7)..(10): 2'-deoxy-2'Fluoro
  misc_feature (11)..(11): 2'-O-methyl
  misc_feature (12)..(13): 2'-deoxy-2'Fluoro
  misc_feature (14)..(14): 2'-O-methyl
  misc_feature (15)..(16): 2'-deoxy-2'Fluoro
  misc_feature (17)..(18): 2'-O-methyl
  misc_feature (19)..(19): 2'-deoxy-2'Fluoro
  misc_feature (20)..(20): Phosphorothioate or Phosphorodithioate 3'-Internucleotide Linkage (optionally present)
  misc_feature (1). .(19): ribonucleotide unmodified or modified as described for this sequence
caaugauuuugucauugautt

SEQ ID NO: 1094 - RNA, 21 nt, Artificial Sequence
  Description of Artificial Sequence: Target Sequence/siNA antisense region (stab35)
  misc_feature (4)..(4): 2'-deoxy-2'Fluoro
  misc_feature (5)..(6): 2'-O-methyl
  misc_feature (7)..(10): 2'-deoxy-2'Fluoro
  misc_feature (11)..(11): 2'-O-methyl
  misc_feature (12)..(13): 2'-deoxy-2'Fluoro
  misc_feature (14)..(14): 2'-O-methyl
  misc_feature (15)..(16): 2'-deoxy-2'Fluoro
  misc_feature (17)..(18): 2'-O-methyl
  misc_feature (19)..(19): 2'-deoxy-2'Fluoro
  misc_feature (20)..(21): 2'-O-methyl
caaugauuuugucauugauuu

SEQ ID NO: 1095 - RNA, 21 nt, Artificial Sequence
  Description of Artificial Sequence: Target Sequence/siNA antisense region (stab36)
  misc_feature (4)..(4): 2'-deoxy-2'Fluoro
  misc_feature (5)..(6): 2'-O-methyl
  misc_feature (7)..(10): 2'-deoxy-2'Fluoro
  misc_feature (11)..(11): 2'-O-methyl
  misc_feature (12)..(13): 2'-deoxy-2'Fluoro
  misc_feature (14)..(14): 2'-O-methyl
  misc_feature (15)..(16): 2'-deoxy-2'Fluoro
  misc_feature (17)..(18): 2'-O-methyl
  misc_feature (19)..(19): 2'-deoxy-2'Fluoro
  misc_feature (20)..(21): 2'-O-methyl
caaugauuuugucauugaugg

SEQ ID NO: 1096 - RNA, 19 nt, Artificial Sequence
  Description of Artificial Sequence: Target Sequence/siNA sense region
gagcucaaggaucuggugg

SEQ ID NO: 1097 - RNA, 19 nt, Artificial Sequence
  Description of Artificial Sequence: Target Sequence/siNA antisense region
ccaccagauccuugagcuc

SEQ ID NO: 1098 - DNA, 21 bp, Artificial Sequence
  Description of Artificial Sequence: Target Sequence/siNA sense region (stab00)
  misc_feature (1)..(19): ribonucleotide unmodified or modified as described for this sequence
gagcucaaggaucugguggtt

SEQ ID NO: 1099 - DNA, 21 bp, Artificial Sequence
  Description of Artificial Sequence: Target Sequence/siNA antisense region (stab00as)
  misc_feature (1)..(19): ribonucleotide unmodified or modified as described for this sequence
ccaccagauccuugagcuctt

SEQ ID NO: 1100 - DNA, 21 bp, Artificial Sequence
  Description of Artificial Sequence: Target Sequence/siNA sense region (stab04)
  misc_feature (1)..(1): 5'-3 attached terminal deoxyabasic moiety, inverted abasic, inverted nucleotide or other terminal cap that is optionally present
  misc_feature (21)..(21): 3'-3 attached terminal deoxyabasic moiety, inverted abasic, inverted nucleotide or other terminal cap that is optionally present
  misc_feature (4)..(6): 2'-deoxy-2'Fluoro
  misc_feature (12)..(14): 2'-deoxy-2'Fluoro
  misc_feature (17)..(17): 2'-deoxy-2'Fluoro
  misc_feature (1). .(19): ribonucleotide unmodified or modified as described for this sequence
gagcucaaggaucugguggtt

SEQ ID NO: 1101 - DNA, 21 bp, Artificial Sequence
  Description of Artificial Sequence: Target Sequence/siNA antisense region (stab05)
  misc_feature (1)..(2): 2'-deoxy-2'Fluoro
  misc_feature (4)..(5): 2'-deoxy-2'Fluoro
  misc_feature (9)..(13): 2'-deoxy-2'Fluoro
  misc_feature (17)..(19): 2'-deoxy-2'Fluoro
  misc_feature (20)..(20): Phosphorothioate or Phosphorodithioate 3'-Internucleotide Linkage (optionally present)
  misc_feature (1). .(19): ribonucleotide unmodified or modified as described for this sequence
ccaccagauccuugagcuctt

SEQ ID NO: 1102 - DNA, 21 bp, Artificial Sequence
  Description of Artificial Sequence: Target Sequence/siNA sense region (stab07)
  misc_feature (1)..(1): 5'-3 attached terminal deoxyabasic moiety, inverted abasic, inverted nucleotide or other terminal cap that is optionally present
  misc_feature (21)..(21): 3'-3 attached terminal deoxyabasic moiety, inverted abasic, inverted nucleotide or other terminal cap that is optionally present
  misc_feature (4)..(6): 2'-deoxy-2'Fluoro
  misc_feature (12)..(14): 2'-deoxy-2'Fluoro
  misc_feature (17)..(17): 2'-deoxy-2'Fluoro
  misc_feature (1)..(19): ribonucleotide unmodified or modified as described for this sequence
gagcucaaggaucugguggtt

SEQ ID NO: 1103 - DNA, 21 bp, Artificial Sequence
  Description of Artificial Sequence: Target Sequence/siNA antisense region (stab08)
  misc_feature (1)..(2): 2'-deoxy-2'Fluoro
  misc_feature (3)..(3): 2'-O-methyl
  misc_feature (4)..(5): 2'-deoxy-2'Fluoro
  misc_feature (6)..(8): 2'-O-methyl
  misc_feature (9)..(13): 2'-deoxy-2'Fluoro
  misc_feature (14)..(16): 2'-O-methyl
  misc_feature (17)..(19): 2'-deoxy-2'Fluoro
  misc_feature (20)..(20): Phosphorothioate or Phosphorodithioate 3'-Internucleotide Linkage (optionally present)
  misc_feature (1)..(19): ribonucleotide unmodified or modified as described for this sequence
ccaccagauccuugagcuctt

SEQ ID NO: 1104 - DNA, 21 bp, Artificial Sequence
  Description of Artificial Sequence: Target Sequence/siNA sense region (stab09)
  misc_feature (1)..(1): 5'-3 attached terminal deoxyabasic moiety, inverted abasic, inverted nucleotide or other terminal cap that is optionally present
  misc_feature (21)..(21): 3'-3 attached terminal deoxyabasic moiety, inverted abasic, inverted nucleotide or other terminal cap that is optionally present
  misc_feature (1)..(19): ribonucleotide unmodified or modified as described for this sequence
gagcucaaggaucugguggtt

SEQ ID NO: 1105 - DNA, 21 bp, Artificial Sequence
  Description of Artificial Sequence: Target Sequence/siNA antisense region (stab10)
  misc_feature (20)..(20): Phosphorothioate or Phosphorodithioate 3'-Internucleotide Linkage (optionally present)
  misc_feature (1)..(19): ribonucleotide unmodified or modified as described for this sequence
ccaccagauccuugagcuctt

SEQ ID NO: 1106 - DNA, 21 bp, Artificial Sequence
  Description of Artificial Sequence: Target Sequence/siNA antisense region (stab19)
  misc_feature (21)..(21): 3'-3 attached terminal deoxyabasic moiety, inverted abasic, inverted nucleotide or other terminal cap that is optionally present
  misc_feature (1)..(2): 2'-deoxy-2'Fluoro
  misc_feature (3)..(3): 2'-O-methyl
  misc_feature (4)..(5): 2'-deoxy-2'Fluoro
  misc_feature (6)..(8): 2'-O-methyl
  misc_feature (9)..(13): 2'-deoxy-2'Fluoro
  misc_feature (14)..(16): 2'-O-methyl
  misc_feature (17)..(19): 2'-deoxy-2'Fluoro
  misc_feature (1)..(19): ribonucleotide unmodified or modified as described for this sequence
ccaccagauccuugagcuctt

SEQ ID NO: 1107 - DNA, 21 bp, Artificial Sequence
  Description of Artificial Sequence: Target Sequence/siNA antisense region (stab22)
  misc_feature (21)..(21): 3'-3 attached terminal deoxyabasic moiety, inverted abasic, inverted nucleotide or other terminal cap that is optionally present
  misc_feature (20)..(20): Phosphorothioate or Phosphorodithioate 3'-Internucleotide Linkage (optionally present)
  misc_feature (1)..(19): ribonucleotide unmodified or modified as described for this sequence
ccaccagauccuugagcuctt

SEQ ID NO: 1108 - DNA, 21 bp, Artificial Sequence
  Description of Artificial Sequence: Target Sequence/siNA antisense region (stab25)
  misc_feature (4)..(5): 2'-deoxy-2'Fluoro
  misc_feature (6)..(8): 2'-O-methyl
  misc_feature (9)..(13): 2'-deoxy-2'Fluoro
  misc_feature (14)..(16): 2'-O-methyl
  misc_feature (17)..(19): 2'-deoxy-2'Fluoro
  misc_feature (20)..(20): Phosphorothioate or Phosphorodithioate 3'-Internucleotide Linkage (optionally present)
  misc_feature (1). .(19): ribonucleotide unmodified or modified as described for this sequence
ccaccagauccuugagcuctt

SEQ ID NO: 1109 - RNA, 21 nt, Artificial Sequence
  Description of Artificial Sequence: Target Sequence/siNA antisense region (stab35)
  misc_feature (4)..(5): 2'-deoxy-2'Fluoro
  misc_feature (6)..(8): 2'-O-methyl
  misc_feature (9)..(13): 2'-deoxy-2'Fluoro
  misc_feature (14)..(16): 2'-O-methyl
  misc_feature (17)..(19): 2'-deoxy-2'Fluoro
  misc_feature (20)..(21): 2'-O-methyl
ccaccagauccuugagcucuu

SEQ ID NO: 1110 - RNA, 21 nt, Artificial Sequence
  Description of Artificial Sequence: Target Sequence/siNA antisense region (stab36)
  misc_feature (4)..(5): 2'-deoxy-2'Fluoro
  misc_feature (6)..(8): 2'-O-methyl
  misc_feature (9)..(13): 2'-deoxy-2'Fluoro
  misc_feature (14)..(16): 2'-O-methyl
  misc_feature (17)..(19): 2'-deoxy-2'Fluoro
  misc_feature (20)..(21): 2'-O-methyl
ccaccagauccuugagcucaa

SEQ ID NO: 1111 - RNA, 19 nt, Artificial Sequence
  Description of Artificial Sequence: Target Sequence/siNA sense region
gugggcacugaggcaaagc

SEQ ID NO: 1112 - RNA, 19 nt, Artificial Sequence
  Description of Artificial Sequence: Target Sequence/siNA antisense region
gcuuugccucagugcccac

SEQ ID NO: 1113 - DNA, 21 bp, Artificial Sequence
  Description of Artificial Sequence: Target Sequence/siNA sense region (stab00)
  misc_feature (1)..(19): ribonucleotide unmodified or modified as described for this sequence
gugggcacugaggcaaagctt

SEQ ID NO: 1114 - DNA, 21 bp, Artificial Sequence
  Description of Artificial Sequence: Target Sequence/siNA antisense region (stab00as)
  misc_feature (1)..(19): ribonucleotide unmodified or modified as described for this sequence
gcuuugccucagugcccactt

SEQ ID NO: 1115 - DNA, 21 bp, Artificial Sequence
  Description of Artificial Sequence: Target Sequence/siNA sense region (stab04)
  misc_feature (1)..(1): 5'-3 attached terminal deoxyabasic moiety, inverted abasic, inverted nucleotide or other terminal cap that is optionally present
  misc_feature (21)..(21): 3'-3 attached terminal deoxyabasic moiety, inverted abasic, inverted nucleotide or other terminal cap that is optionally present
  misc_feature (2)..(2): 2'-deoxy-2'Fluoro
  misc_feature (6)..(6): 2'-deoxy-2'Fluoro
  misc_feature (8)..(9): 2'-deoxy-2'Fluoro
  misc_feature (14)..(14): 2'-deoxy-2'Fluoro
  misc_feature (19)..(19): 2'-deoxy-2'Fluoro
  misc_feature (1). .(19): ribonucleotide unmodified or modified as described for this sequence
gugggcacugaggcaaagctt

SEQ ID NO: 1116 - DNA, 21 bp, Artificial Sequence
  Description of Artificial Sequence: Target Sequence/siNA antisense region (stab05)
  misc_feature (2)..(5): 2'-deoxy-2'Fluoro
  misc_feature (7)..(10): 2'-deoxy-2'Fluoro
  misc_feature (13)..(13): 2'-deoxy-2'Fluoro
  misc_feature (15)..(17): 2'-deoxy-2'Fluoro
  misc_feature (19)..(19): 2'-deoxy-2'Fluoro
  misc_feature (20)..(20): Phosphorothioate or Phosphorodithioate 3'-Internucleotide Linkage (optionally present)
  misc_feature (1). .(19): ribonucleotide unmodified or modified as described for this sequence
gcuuugccucagugcccactt

SEQ ID NO: 1117 - DNA, 21 bp, Artificial Sequence
  Description of Artificial Sequence: Target Sequence/siNA sense region (stab07)
  misc_feature (1)..(1): 5'-3 attached terminal deoxyabasic moiety, inverted abasic, inverted nucleotide or other terminal cap that is optionally present
  misc_feature (21)..(21): 3'-3 attached terminal deoxyabasic moiety, inverted abasic, inverted nucleotide or other terminal cap that is optionally present
  misc_feature (2)..(2): 2'-deoxy-2'Fluoro
  misc_feature (6)..(6): 2'-deoxy-2'Fluoro
  misc_feature (8)..(9): 2'-deoxy-2'Fluoro
  misc_feature (14)..(14): 2'-deoxy-2'Fluoro
  misc_feature (19)..(19): 2'-deoxy-2'Fluoro
  misc_feature (1)..(19): ribonucleotide unmodified or modified as described for this sequence
gugggcacugaggcaaagctt

SEQ ID NO: 1118 - DNA, 21 bp, Artificial Sequence
  Description of Artificial Sequence: Target Sequence/siNA antisense region (stab08)
  misc_feature (1)..(1): 2'-O-methyl
  misc_feature (2)..(5): 2'-deoxy-2'Fluoro
  misc_feature (6)..(6): 2'-O-methyl
  misc_feature (7)..(10): 2'-deoxy-2'Fluoro
  misc_feature (11)..(12): 2'-O-methyl
  misc_feature (13)..(13): 2'-deoxy-2'Fluoro
  misc_feature (14)..(14): 2'-O-methyl
  misc_feature (15)..(17): 2'-deoxy-2'Fluoro
  misc_feature (18)..(18): 2'-O-methyl
  misc_feature (19)..(19): 2'-deoxy-2'Fluoro
  misc_feature (20)..(20): Phosphorothioate or Phosphorodithioate 3'-Internucleotide Linkage (optionally present)
  misc_feature (1)..(19): ribonucleotide unmodified or modified as described for this sequence
gcuuugccucagugcccactt

SEQ ID NO: 1119 - DNA, 21 bp, Artificial Sequence
  Description of Artificial Sequence: Target Sequence/siNA sense region (stab09)
  misc_feature (1)..(1): 5'-3 attached terminal deoxyabasic moiety, inverted abasic, inverted nucleotide or other terminal cap that is optionally present
  misc_feature (21)..(21): 3'-3 attached terminal deoxyabasic moiety, inverted abasic, inverted nucleotide or other terminal cap that is optionally present
  misc_feature (1)..(19): ribonucleotide unmodified or modified as described for this sequence
gugggcacugaggcaaagctt

SEQ ID NO: 1120 - DNA, 21 bp, Artificial Sequence
  Description of Artificial Sequence: Target Sequence/siNA antisense region (stab10)
  misc_feature (20)..(20): Phosphorothioate or Phosphorodithioate 3'-Internucleotide Linkage (optionally present)
  misc_feature (1)..(19): ribonucleotide unmodified or modified as described for this sequence
gcuuugccucagugcccactt

SEQ ID NO: 1121 - DNA, 21 bp, Artificial Sequence
  Description of Artificial Sequence: Target Sequence/siNA antisense region (stab19)
  misc_feature (21)..(21): 3'-3 attached terminal deoxyabasic moiety, inverted abasic, inverted nucleotide or other terminal cap that is optionally present
  misc_feature (1)..(1): 2'-O-methyl
  misc_feature (2)..(5): 2'-deoxy-2'Fluoro
  misc_feature (6)..(6): 2'-O-methyl
  misc_feature (7)..(10): 2'-deoxy-2'Fluoro
  misc_feature (11)..(12): 2'-O-methyl
  misc_feature (13)..(13): 2'-deoxy-2'Fluoro
  misc_feature (14)..(14): 2'-O-methyl
  misc_feature (15)..(17): 2'-deoxy-2'Fluoro
  misc_feature (18)..(18): 2'-O-methyl
  misc_feature (19)..(19): 2'-deoxy-2'Fluoro
  misc_feature (1)..(19): ribonucleotide unmodified or modified as described for this sequence
gcuuugccucagugcccactt

SEQ ID NO: 1122 - DNA, 21 bp, Artificial Sequence
  Description of Artificial Sequence: Target Sequence/siNA antisense region (stab22)
  misc_feature (21)..(21): 3'-3 attached terminal deoxyabasic moiety, inverted abasic, inverted nucleotide or other terminal cap that is optionally present
  misc_feature (20)..(20): Phosphorothioate or Phosphorodithioate 3'-Internucleotide Linkage (optionally present)
  misc_feature (1)..(19): ribonucleotide unmodified or modified as described for this sequence
gcuuugccucagugcccactt

SEQ ID NO: 1123 - DNA, 21 bp, Artificial Sequence
  Description of Artificial Sequence: Target Sequence/siNA antisense region (stab25)
  misc_feature (4)..(5): 2'-deoxy-2'Fluoro
  misc_feature (6)..(6): 2'-O-methyl
  misc_feature (7)..(10): 2'-deoxy-2'Fluoro
  misc_feature (11)..(12): 2'-O-methyl
  misc_feature (13)..(13): 2'-deoxy-2'Fluoro
  misc_feature (14)..(14): 2'-O-methyl
  misc_feature (15)..(17): 2'-deoxy-2'Fluoro
  misc_feature (18)..(18): 2'-O-methyl
  misc_feature (19)..(19): 2'-deoxy-2'Fluoro
  misc_feature (20)..(20): Phosphorothioate or Phosphorodithioate 3'-Internucleotide Linkage (optionally present)
  misc_feature (1)..(19): ribonucleotide unmodified or modified as described for this sequence
gcuuugccucagugcccactt

SEQ ID NO: 1124 - RNA, 21 nt, Artificial Sequence
  Description of Artificial Sequence: Target Sequence/siNA antisense region (stab35)
  misc_feature (4)..(5): 2'-deoxy-2'Fluoro
  misc_feature (6)..(6): 2'-O-methyl
  misc_feature (7)..(10): 2'-deoxy-2'Fluoro
  misc_feature (11)..(12): 2'-O-methyl
  misc_feature (13)..(13): 2'-deoxy-2'Fluoro
  misc_feature (14)..(14): 2'-O-methyl
  misc_feature (15)..(17): 2'-deoxy-2'Fluoro
  misc_feature (18)..(18): 2'-O-methyl
  misc_feature (19)..(19): 2'-deoxy-2'Fluoro
  misc_feature (20)..(21): 2'-O-methyl
gcuuugccucagugcccacuu

SEQ ID NO: 1125 - RNA, 21 nt, Artificial Sequence
  Description of Artificial Sequence: Target Sequence/siNA antisense region (stab36)
  misc_feature (4)..(5): 2'-deoxy-2'Fluoro
  misc_feature (6)..(6): 2'-O-methyl
  misc_feature (7)..(10): 2'-deoxy-2'Fluoro
  misc_feature (11)..(12): 2'-O-methyl
  misc_feature (13)..(13): 2'-deoxy-2'Fluoro
  misc_feature (14)..(14): 2'-O-methyl
  misc_feature (15)..(17): 2'-deoxy-2'Fluoro
  misc_feature (18)..(18): 2'-O-methyl
  misc_feature (19)..(19): 2'-deoxy-2'Fluoro
  misc_feature (20)..(21): 2'-O-methyl
gcuuugccucagugcccacca

SEQ ID NO: 1126 - RNA, 19 nt, Artificial Sequence
  Description of Artificial Sequence: Target Sequence/siNA sense region
cugaauaaaucugcugucu

SEQ ID NO: 1127 - RNA, 19 nt, Artificial Sequence
  Description of Artificial Sequence: Target Sequence/siNA antisense region
agacagcagauuuauucag

SEQ ID NO: 1128 - DNA, 21 bp, Artificial Sequence
  Description of Artificial Sequence: Target Sequence/siNA sense region (stab00)
  misc_feature (1)..(19): ribonucleotide unmodified or modified as described for this sequence
cugaauaaaucugcugucutt

SEQ ID NO: 1129 - DNA, 21 bp, Artificial Sequence
  Description of Artificial Sequence: Target Sequence/siNA antisense region (stab00as)
  misc_feature (1)..(19): ribonucleotide unmodified or modified as described for this sequence
agacagcagauuuauucagtt

SEQ ID NO: 1130 - DNA, 21 bp, Artificial Sequence
  Description of Artificial Sequence: Target Sequence/siNA sense region (stab04)
  misc_feature (1)..(1): 5'-3 attached terminal deoxyabasic moiety, inverted abasic, inverted nucleotide or other terminal cap that is optionally present
  misc_feature (21)..(21): 3'-3 attached terminal deoxyabasic moiety, inverted abasic, inverted nucleotide or other terminal cap that is optionally present
  misc_feature (1)..(2): 2'-deoxy-2'Fluoro
  misc_feature (6)..(6): 2'-deoxy-2'Fluoro
  misc_feature (10)..(12): 2'-deoxy-2'Fluoro
  misc_feature (14)..(15): 2'-deoxy-2'Fluoro
  misc_feature (17)..(19): 2'-deoxy-2'Fluoro
  misc_feature (1). .(19): ribonucleotide unmodified or modified as described for this sequence
cugaauaaaucugcugucutt

SEQ ID NO: 1131 - DNA, 21 bp, Artificial Sequence
  Description of Artificial Sequence: Target Sequence/siNA antisense region (stab05)
  misc_feature (4)..(4): 2'-deoxy-2'Fluoro
  misc_feature (7)..(7): 2'-deoxy-2'Fluoro
  misc_feature (11)..(13): 2'-deoxy-2'Fluoro
  misc_feature (15)..(17): 2'-deoxy-2'Fluoro
  misc_feature (20)..(20): Phosphorothioate or Phosphorodithioate 3'-Internucleotide Linkage (optionally present)
  misc_feature (1). .(19): ribonucleotide unmodified or modified as described for this sequence
agacagcagauuuauucagtt

SEQ ID NO: 1132 - DNA, 21 bp, Artificial Sequence
  Description of Artificial Sequence: Target Sequence/siNA sense region (stab07)
  misc_feature (1)..(1): 5'-3 attached terminal deoxyabasic moiety, inverted abasic, inverted nucleotide or other terminal cap that is optionally present
  misc_feature (21)..(21): 3'-3 attached terminal deoxyabasic moiety, inverted abasic, inverted nucleotide or other terminal cap that is optionally present
  misc_feature (1)..(2): 2'-deoxy-2'Fluoro
  misc_feature (6)..(6): 2'-deoxy-2'Fluoro
  misc_feature (10)..(12): 2'-deoxy-2'Fluoro
  misc_feature (14)..(15): 2'-deoxy-2'Fluoro
  misc_feature (17)..(19): 2'-deoxy-2'Fluoro
cugaauaaaucugcugucutt

SEQ ID NO: 1133 - DNA, 21 bp, Artificial Sequence
  Description of Artificial Sequence: Target Sequence/siNA antisense region (stab08)
  misc_feature (1)..(3): 2'-O-methyl
  misc_feature (4)..(4): 2'-deoxy-2'Fluoro
  misc_feature (5)..(6): 2'-O-methyl
  misc_feature (7)..(7): 2'-deoxy-2'Fluoro
  misc_feature (8)..(10): 2'-O-methyl
  misc_feature (11)..(13): 2'-deoxy-2'Fluoro
  misc_feature (14)..(14): 2'-O-methyl
  misc_feature (15)..(17): 2'-deoxy-2'Fluoro
  misc_feature (18)..(19): 2'-O-methyl
  misc_feature (20)..(20): Phosphorothioate or Phosphorodithioate 3'-Internucleotide Linkage (optionally present)
  misc_feature (1)..(19): ribonucleotide unmodified or modified as described for this sequence
agacagcagauuuauucagtt

SEQ ID NO: 1134 - DNA, 21 bp, Artificial Sequence
  Description of Artificial Sequence: Target Sequence/siNA sense region (stab09)
  misc_feature (1)..(1): 5'-3 attached terminal deoxyabasic moiety, inverted abasic, inverted nucleotide or other terminal cap that is optionally present
  misc_feature (21)..(21): 3'-3 attached terminal deoxyabasic moiety, inverted abasic, inverted nucleotide or other terminal cap that is optionally present
  misc_feature (1)..(19): ribonucleotide unmodified or modified as described for this sequence
cugaauaaaucugcugucutt

SEQ ID NO: 1135 - DNA, 21 bp, Artificial Sequence
  Description of Artificial Sequence: Target Sequence/siNA antisense region (stab10)
  misc_feature (20)..(20): Phosphorothioate or Phosphorodithioate 3'-Internucleotide Linkage (optionally present)
  misc_feature (1)..(19): ribonucleotide unmodified or modified as described for this sequence
agacagcagauuuauucagtt

SEQ ID NO: 1136 - DNA, 21 bp, Artificial Sequence
  Description of Artificial Sequence: Target Sequence/siNA antisense region (stab19)
  misc_feature (21)..(21): 3'-3 attached terminal deoxyabasic moiety, inverted abasic, inverted nucleotide or other terminal cap that is optionally present
  misc_feature (1)..(3): 2'-O-methyl
  misc_feature (4)..(4): 2'-deoxy-2'Fluoro
  misc_feature (5)..(6): 2'-O-methyl
  misc_feature (7)..(7): 2'-deoxy-2'Fluoro
  misc_feature (8)..(10): 2'-O-methyl
  misc_feature (11)..(13): 2'-deoxy-2'Fluoro
  misc_feature (14)..(14): 2'-O-methyl
  misc_feature (15)..(17): 2'-deoxy-2'Fluoro
  misc_feature (18)..(19): 2'-O-methyl
  misc_feature (1)..(19): ribonucleotide unmodified or modified as described for this sequence
agacagcagauuuauucagtt

SEQ ID NO: 1137 - DNA, 21 bp, Artificial Sequence
  Description of Artificial Sequence: Target Sequence/siNA antisense region (stab22)
  misc_feature (21)..(21): 3'-3 attached terminal deoxyabasic moiety, inverted abasic, inverted nucleotide or other terminal cap that is optionally present
  misc_feature (20)..(20): Phosphorothioate or Phosphorodithioate 3'-Internucleotide Linkage (optionally present)
  misc_feature (1)..(19): ribonucleotide unmodified or modified as described for this sequence
agacagcagauuuauucagtt

SEQ ID NO: 1138 - DNA, 21 bp, Artificial Sequence
  Description of Artificial Sequence: Target Sequence/siNA antisense region (stab25)
  misc_feature (4)..(4): 2'-deoxy-2'Fluoro
  misc_feature (5)..(6): 2'-O-methyl
  misc_feature (7)..(7): 2'-deoxy-2'Fluoro
  misc_feature (8)..(10): 2'-O-methyl
  misc_feature (11)..(13): 2'-deoxy-2'Fluoro
  misc_feature (14)..(14): 2'-O-methyl
  misc_feature (15)..(17): 2'-deoxy-2'Fluoro
  misc_feature (18)..(19): 2'-O-methyl
  misc_feature (20)..(20): Phosphorothioate or Phosphorodithioate 3'-Internucleotide Linkage (optionally present)
  misc_feature (1). .(19): ribonucleotide unmodified or modified as described for this sequence
agacagcagauuuauucagtt

SEQ ID NO: 1139 - RNA, 21 nt, Artificial Sequence
  Description of Artificial Sequence: Target Sequence/siNA antisense region (stab35)
  misc_feature (4)..(4): 2'-deoxy-2'Fluoro
  misc_feature (5)..(6): 2'-O-methyl
  misc_feature (7)..(7): 2'-deoxy-2'Fluoro
  misc_feature (8)..(10): 2'-O-methyl
  misc_feature (11)..(13): 2'-deoxy-2'Fluoro
  misc_feature (14)..(14): 2'-O-methyl
  misc_feature (15)..(17): 2'-deoxy-2'Fluoro
  misc_feature (18)..(21): 2'-O-methyl
agacagcagauuuauucaguu

SEQ ID NO: 1140 - RNA, 21 nt, Artificial Sequence
  Description of Artificial Sequence: Target Sequence/siNA antisense region (stab36)
  misc_feature (4)..(4): 2'-deoxy-2'Fluoro
  misc_feature (5)..(6): 2'-O-methyl
  misc_feature (7)..(7): 2'-deoxy-2'Fluoro
  misc_feature (8)..(10): 2'-O-methyl
  misc_feature (11)..(13): 2'-deoxy-2'Fluoro
  misc_feature (14)..(14): 2'-O-methyl
  misc_feature (15)..(17): 2'-deoxy-2'Fluoro
  misc_feature (18)..(21): 2'-O-methyl
agacagcagauuuauucagcu

SEQ ID NO: 1141 - RNA, 19 nt, Artificial Sequence
  Description of Artificial Sequence: Target Sequence/siNA sense region
uugcgcaaggccaucgacu

SEQ ID NO: 1142 - RNA, 19 nt, Artificial Sequence
  Description of Artificial Sequence: Target Sequence/siNA antisense region
agucgauggccuugcgcaa

SEQ ID NO: 1143 - DNA, 21 bp, Artificial Sequence
  Description of Artificial Sequence: Target Sequence/siNA sense region (stab00)
  misc_feature (1)..(19): ribonucleotide unmodified or modified as described for this sequence
uugcgcaaggccaucgacutt

SEQ ID NO: 1144 - DNA, 21 bp, Artificial Sequence
  Description of Artificial Sequence: Target Sequence/siNA antisense region (stab00as)
  misc_feature (1)..(19): ribonucleotide unmodified or modified as described for this sequence
agucgauggccuugcgcaatt

SEQ ID NO: 1145 - DNA, 21 bp, Artificial Sequence
  Description of Artificial Sequence: Target Sequence/siNA sense region (stab04)
  misc_feature (1)..(1): 5'-3 attached terminal deoxyabasic moiety, inverted abasic, inverted nucleotide or other terminal cap that is optionally present
  misc_feature (21)..(21): 3'-3 attached terminal deoxyabasic moiety, inverted abasic, inverted nucleotide or other terminal cap that is optionally present
  misc_feature (1)..(2): 2'-deoxy-2'Fluoro
  misc_feature (4)..(4): 2'-deoxy-2'Fluoro
  misc_feature (6)..(6): 2'-deoxy-2'Fluoro
  misc_feature (11)..(12): 2'-deoxy-2'Fluoro
  misc_feature (14)..(15): 2'-deoxy-2'Fluoro
  misc_feature (18)..(19): 2'-deoxy-2'Fluoro
  misc_feature (1). .(19): ribonucleotide unmodified or modified as described for this sequence
uugcgcaaggccaucgacutt

SEQ ID NO: 1146 - DNA, 21 bp, Artificial Sequence
  Description of Artificial Sequence: Target Sequence/siNA antisense region (stab05)
  misc_feature (3)..(4): 2'-deoxy-2'Fluoro
  misc_feature (7)..(7): 2'-deoxy-2'Fluoro
  misc_feature (10)..(13): 2'-deoxy-2'Fluoro
  misc_feature (15)..(15): 2'-deoxy-2'Fluoro
  misc_feature (17)..(17): 2'-deoxy-2'Fluoro
  misc_feature (20)..(20): Phosphorothioate or Phosphorodithioate 3'-Internucleotide Linkage (optionally present)
  misc_feature (1)..(19): ribonucleotide unmodified or modified as described for this sequence
agucgauggccuugcgcaatt

SEQ ID NO: 1147 - DNA, 21 bp, Artificial Sequence
  Description of Artificial Sequence: Target Sequence/siNA sense region (stab07)
  misc_feature (1)..(1): 5'-3 attached terminal deoxyabasic moiety, inverted abasic, inverted nucleotide or other terminal cap that is optionally present
  misc_feature (21)..(21): 3'-3 attached terminal deoxyabasic moiety, inverted abasic, inverted nucleotide or other terminal cap that is optionally present
  misc_feature (1)..(2): 2'-deoxy-2'Fluoro
  misc_feature (4)..(4): 2'-deoxy-2'Fluoro
  misc_feature (6)..(6): 2'-deoxy-2'Fluoro
  misc_feature (11)..(12): 2'-deoxy-2'Fluoro
  misc_feature (14)..(15): 2'-deoxy-2'Fluoro
  misc_feature (18)..(19): 2'-deoxy-2'Fluoro
  misc_feature (1)..(19): ribonucleotide unmodified or modified as described for this sequence
uugcgcaaggccaucgacutt

SEQ ID NO: 1148 - DNA, 21 bp, Artificial Sequence
  Description of Artificial Sequence: Target Sequence/siNA antisense region (stab08)
  misc_feature (1)..(2): 2'-O-methyl
  misc_feature (3)..(4): 2'-deoxy-2'Fluoro
  misc_feature (5)..(6): 2'-O-methyl
  misc_feature (7)..(7): 2'-deoxy-2'Fluoro
  misc_feature (8)..(9): 2'-O-methyl
  misc_feature (10)..(13): 2'-deoxy-2'Fluoro
  misc_feature (14)..(14): 2'-O-methyl
  misc_feature (15)..(15): 2'-deoxy-2'Fluoro
  misc_feature (16)..(16): 2'-O-methyl
  misc_feature (17)..(17): 2'-deoxy-2'Fluoro
  misc_feature (18)..(19): 2'-O-methyl
  misc_feature (20)..(20): Phosphorothioate or Phosphorodithioate 3'-Internucleotide Linkage (optionally present)
  misc_feature (1)..(19): ribonucleotide unmodified or modified as described for this sequence
agucgauggccuugcgcaatt

SEQ ID NO: 1149 - DNA, 21 bp, Artificial Sequence
  Description of Artificial Sequence: Target Sequence/siNA sense region (stab09)
  misc_feature (1)..(1): 5'-3 attached terminal deoxyabasic moiety, inverted abasic, inverted nucleotide or other terminal cap that is optionally present
  misc_feature (21)..(21): 3'-3 attached terminal deoxyabasic moiety, inverted abasic, inverted nucleotide or other terminal cap that is optionally present
  misc_feature (1)..(19): ribonucleotide unmodified or modified as described for this sequence
uugcgcaaggccaucgacutt

SEQ ID NO: 1150 - DNA, 21 bp, Artificial Sequence
  Description of Artificial Sequence: Target Sequence/siNA antisense region (stab10)
  misc_feature (20)..(20): Phosphorothioate or Phosphorodithioate 3'-Internucleotide Linkage (optionally present)
  misc_feature (1)..(19): ribonucleotide unmodified or modified as described for this sequence
agucgauggccuugcgcaatt

SEQ ID NO: 1151 - DNA, 21 bp, Artificial Sequence
  Description of Artificial Sequence: Target Sequence/siNA antisense region (stab19)
  misc_feature (21)..(21): 3'-3 attached terminal deoxyabasic moiety, inverted abasic, inverted nucleotide or other terminal cap that is optionally present
  misc_feature (1)..(2): 2'-O-methyl
  misc_feature (3)..(4): 2'-deoxy-2'Fluoro
  misc_feature (5)..(6): 2'-O-methyl
  misc_feature (7)..(7): 2'-deoxy-2'Fluoro
  misc_feature (8)..(9): 2'-O-methyl
  misc_feature (10)..(13): 2'-deoxy-2'Fluoro
  misc_feature (14)..(14): 2'-O-methyl
  misc_feature (15)..(15): 2'-deoxy-2'Fluoro
  misc_feature (16)..(16): 2'-O-methyl
  misc_feature (17)..(17): 2'-deoxy-2'Fluoro
  misc_feature (18)..(19): 2'-O-methyl
  misc_feature (1)..(19): ribonucleotide unmodified or modified as described for this sequence
agucgauggccuugcgcaatt

SEQ ID NO: 1152 - DNA, 21 bp, Artificial Sequence
  Description of Artificial Sequence: Target Sequence/siNA antisense region (stab22)
  misc_feature (21)..(21): 3'-3 attached terminal deoxyabasic moiety, inverted abasic, inverted nucleotide or other terminal cap that is optionally present
  misc_feature (20)..(20): Phosphorothioate or Phosphorodithioate 3'-Internucleotide Linkage (optionally present)
  misc_feature (1)..(19): ribonucleotide unmodified or modified as described for this sequence
agucgauggccuugcgcaatt

SEQ ID NO: 1153 - DNA, 21 bp, Artificial Sequence
  Description of Artificial Sequence: Target Sequence/siNA antisense region (stab25)
  misc_feature (4)..(4): 2'-deoxy-2'Fluoro
  misc_feature (5)..(6): 2'-O-methyl
  misc_feature (7)..(7): 2'-deoxy-2'Fluoro
  misc_feature (8)..(9): 2'-O-methyl
  misc_feature (10)..(13): 2'-deoxy-2'Fluoro
  misc_feature (14)..(14): 2'-O-methyl
  misc_feature (15)..(15): 2'-deoxy-2'Fluoro
  misc_feature (16)..(16): 2'-O-methyl
  misc_feature (17)..(17): 2'-deoxy-2'Fluoro
  misc_feature (18)..(19): 2'-O-methyl
  misc_feature (20)..(20): Phosphorothioate or Phosphorodithioate 3'-Internucleotide Linkage (optionally present)
  misc_feature (1). .(19): ribonucleotide unmodified or modified as described for this sequence
agucgauggccuugcgcaatt

SEQ ID NO: 1154 - RNA, 21 nt, Artificial Sequence
  Description of Artificial Sequence: Target Sequence/siNA antisense region (stab35)
  misc_feature (4)..(4): 2'-deoxy-2'Fluoro
  misc_feature (5)..(6): 2'-O-methyl
  misc_feature (7)..(7): 2'-deoxy-2'Fluoro
  misc_feature (8)..(9): 2'-O-methyl
  misc_feature (10)..(13): 2'-deoxy-2'Fluoro
  misc_feature (14)..(14): 2'-O-methyl
  misc_feature (15)..(15): 2'-deoxy-2'Fluoro
  misc_feature (16)..(16): 2'-O-methyl
  misc_feature (17)..(17): 2'-deoxy-2'Fluoro
  misc_feature (18)..(21): 2'-O-methyl
agucgauggccuugcgcaauu

SEQ ID NO: 1155 - RNA, 21 nt, Artificial Sequence
  Description of Artificial Sequence: Target Sequence/siNA antisense region (stab36)
  misc_feature (4)..(4): 2'-deoxy-2'Fluoro
  misc_feature (5)..(6): 2'-O-methyl
  misc_feature (7)..(7): 2'-deoxy-2'Fluoro
  misc_feature (8)..(9): 2'-O-methyl
  misc_feature (10)..(13): 2'-deoxy-2'Fluoro
  misc_feature (14)..(14): 2'-O-methyl
  misc_feature (15)..(15): 2'-deoxy-2'Fluoro
  misc_feature (16)..(16): 2'-O-methyl
  misc_feature (17)..(17): 2'-deoxy-2'Fluoro
  misc_feature (18)..(21): 2'-O-methyl
agucgauggccuugcgcaaga

SEQ ID NO: 1156 - RNA, 19 nt, Artificial Sequence
  Description of Artificial Sequence: Target Sequence/siNA sense region
uacauucgcuuucugcaac

SEQ ID NO: 1157 - RNA, 19 nt, Artificial Sequence
  Description of Artificial Sequence: Target Sequence/siNA antisense region
guugcagaaagcgaaugua

SEQ ID NO: 1158 - DNA, 21 bp, Artificial Sequence
  Description of Artificial Sequence: Target Sequence/siNA sense region (stab00)
  misc_feature (1)..(19): ribonucleotide unmodified or modified as described for this sequence
uacauucgcuuucugcaactt

SEQ ID NO: 1159 - DNA, 21 bp, Artificial Sequence
  Description of Artificial Sequence: Target Sequence/siNA antisense region (stab00as)
  misc_feature (1). .(19): ribonucleotide unmodified or modified as described for this sequence
guugcagaaagcgaauguatt

SEQ ID NO: 1160 - DNA, 21 bp, Artificial Sequence
  Description of Artificial Sequence: Target Sequence/siNA sense region (stab04)
  misc_feature (1)..(1): 5'-3 attached terminal deoxyabasic moiety, inverted abasic, inverted nucleotide or other terminal cap that is optionally present
  misc_feature (21)..(21): 3'-3 attached terminal deoxyabasic moiety, inverted abasic, inverted nucleotide or other terminal cap that is optionally present
  misc_feature (1)..(1): 2'-deoxy-2'Fluoro
  misc_feature (3)..(3): 2'-deoxy-2'Fluoro
  misc_feature (5)..(7): 2'-deoxy-2'Fluoro
  misc_feature (9)..(14): 2'-deoxy-2'Fluoro
  misc_feature (16)..(16): 2'-deoxy-2'Fluoro
  misc_feature (19)..(19): 2'-deoxy-2'Fluoro
  misc_feature (1). .(19): ribonucleotide unmodified or modified as described for this sequence
uacauucgcuuucugcaactt

SEQ ID NO: 1161 - DNA, 21 bp, Artificial Sequence
  Description of Artificial Sequence: Target Sequence/siNA antisense region (stab05)
  misc_feature (2)..(3): 2'-deoxy-2'Fluoro
  misc_feature (5)..(5): 2'-deoxy-2'Fluoro
  misc_feature (12)..(12): 2'-deoxy-2'Fluoro
  misc_feature (16)..(16): 2'-deoxy-2'Fluoro
  misc_feature (18)..(18): 2'-deoxy-2'Fluoro
  misc_feature (20)..(20): Phosphorothioate or Phosphorodithioate 3'-Internucleotide Linkage (optionally present)
  misc_feature (1). .(19): ribonucleotide unmodified or modified as described for this sequence
guugcagaaagcgaauguatt

SEQ ID NO: 1162 - DNA, 21 bp, Artificial Sequence
  Description of Artificial Sequence: Target Sequence/siNA sense region (stab07)
  misc_feature (1)..(1): 5'-3 attached terminal deoxyabasic moiety, inverted abasic, inverted nucleotide or other terminal cap that is optionally present
  misc_feature (21)..(21): 3'-3 attached terminal deoxyabasic moiety, inverted abasic, inverted nucleotide or other terminal cap that is optionally present
  misc_feature (1)..(1): 2'-deoxy-2'Fluoro
  misc_feature (3)..(3): 2'-deoxy-2'Fluoro
  misc_feature (5)..(7): 2'-deoxy-2'Fluoro
  misc_feature (9)..(14): 2'-deoxy-2'Fluoro
  misc_feature (16)..(16): 2'-deoxy-2'Fluoro
  misc_feature (19)..(19): 2'-deoxy-2'Fluoro
  misc_feature (1)..(19): ribonucleotide unmodified or modified as described for this sequence
uacauucgcuuucugcaactt

SEQ ID NO: 1163 - DNA, 21 bp, Artificial Sequence
  Description of Artificial Sequence: Target Sequence/siNA antisense region (stab08)
  misc_feature (1)..(1): 2'-O-methyl
  misc_feature (2)..(3): 2'-deoxy-2'Fluoro
  misc_feature (4)..(4): 2'-O-methyl
  misc_feature (5)..(5): 2'-deoxy-2'Fluoro
  misc_feature (6)..(11): 2'-O-methyl
  misc_feature (12)..(12): 2'-deoxy-2'Fluoro
  misc_feature (13)..(15): 2'-O-methyl
  misc_feature (16)..(16): 2'-deoxy-2'Fluoro
  misc_feature (17)..(17): 2'-O-methyl
  misc_feature (18)..(18): 2'-deoxy-2'Fluoro
  misc_feature (19)..(19): 2'-O-methyl
  misc_feature (20)..(20): Phosphorothioate or Phosphorodithioate 3'-Internucleotide Linkage (optionally present)
  misc_feature (1)..(19): ribonucleotide unmodified or modified as described for this sequence
guugcagaaagcgaauguatt

SEQ ID NO: 1164 - DNA, 21 bp, Artificial Sequence
  Description of Artificial Sequence: Target Sequence/siNA sense region (stab09)
  misc_feature (1)..(1): 5'-3 attached terminal deoxyabasic moiety, inverted abasic, inverted nucleotide or other terminal cap that is optionally present
  misc_feature (21)..(21): 3'-3 attached terminal deoxyabasic moiety, inverted abasic, inverted nucleotide or other terminal cap that is optionally present
  misc_feature (1)..(19): ribonucleotide unmodified or modified as described for this sequence
uacauucgcuuucugcaactt

SEQ ID NO: 1165 - DNA, 21 bp, Artificial Sequence
  Description of Artificial Sequence: Target Sequence/siNA antisense region (stab10)
  misc_feature (20)..(20): Phosphorothioate or Phosphorodithioate 3'-Internucleotide Linkage (optionally present)
  misc_feature (1)..(19): ribonucleotide unmodified or modified as described for this sequence
guugcagaaagcgaauguatt

SEQ ID NO: 1166 - DNA, 21 bp, Artificial Sequence
  Description of Artificial Sequence: Target Sequence/siNA antisense region (stab19)
  misc_feature (21)..(21): 3'-3 attached terminal deoxyabasic moiety, inverted abasic, inverted nucleotide or other terminal cap that is optionally present
  misc_feature (1)..(1): 2'-O-methyl
  misc_feature (2)..(3): 2'-deoxy-2'Fluoro
  misc_feature (4)..(4): 2'-O-methyl
  misc_feature (5)..(5): 2'-deoxy-2'Fluoro
  misc_feature (6)..(11): 2'-O-methyl
  misc_feature (12)..(12): 2'-deoxy-2'Fluoro
  misc_feature (13)..(15): 2'-O-methyl
  misc_feature (16)..(16): 2'-deoxy-2'Fluoro
  misc_feature (17)..(17): 2'-O-methyl
  misc_feature (18)..(18): 2'-deoxy-2'Fluoro
  misc_feature (19)..(19): 2'-O-methyl
  misc_feature (1)..(19): ribonucleotide unmodified or modified as described for this sequence
guugcagaaagcgaauguatt

SEQ ID NO: 1167 - DNA, 21 bp, Artificial Sequence
  Description of Artificial Sequence: Target Sequence/siNA antisense region (stab22)
  misc_feature (21)..(21): 3'-3 attached terminal deoxyabasic moiety, inverted abasic, inverted nucleotide or other terminal cap that is optionally present
  misc_feature (20)..(20): Phosphorothioate or Phosphorodithioate 3'-Internucleotide Linkage (optionally present)
  misc_feature (1)..(19): ribonucleotide unmodified or modified as described for this sequence
guugcagaaagcgaauguatt

SEQ ID NO: 1168 - DNA, 21 bp, Artificial Sequence
  Description of Artificial Sequence: Target Sequence/siNA antisense region (stab25)
  misc_feature (4)..(4): 2'-O-methyl
  misc_feature (5)..(5): 2'-deoxy-2'Fluoro
  misc_feature (6)..(11): 2'-O-methyl
  misc_feature (12)..(12): 2'-deoxy-2'Fluoro
  misc_feature (13)..(15): 2'-O-methyl
  misc_feature (16)..(16): 2'-deoxy-2'Fluoro
  misc_feature (17)..(17): 2'-O-methyl
  misc_feature (18)..(18): 2'-deoxy-2'Fluoro
  misc_feature (19)..(19): 2'-O-methyl
  misc_feature (20)..(20): Phosphorothioate or Phosphorodithioate 3'-Internucleotide Linkage (optionally present)
  misc_feature (1). .(19): ribonucleotide unmodified or modified as described for this sequence
guugcagaaagcgaauguatt

SEQ ID NO: 1169 - RNA, 21 nt, Artificial Sequence
  Description of Artificial Sequence: Target Sequence/siNA antisense region (stab35)
  misc_feature (4)..(4): 2'-O-methyl
  misc_feature (5)..(5): 2'-deoxy-2'Fluoro
  misc_feature (6)..(11): 2'-O-methyl
  misc_feature (12)..(12): 2'-deoxy-2'Fluoro
  misc_feature (13)..(15): 2'-O-methyl
  misc_feature (16)..(16): 2'-deoxy-2'Fluoro
  misc_feature (17)..(17): 2'-O-methyl
  misc_feature (18)..(18): 2'-deoxy-2'Fluoro
  misc_feature (19)..(21): 2'-O-methyl
guugcagaaagcgaauguauu

SEQ ID NO: 1170 - RNA, 21 nt, Artificial Sequence
  Description of Artificial Sequence: Target Sequence/siNA antisense region (stab36)
  misc_feature (4)..(4): 2'-O-methyl
  misc_feature (5)..(5): 2'-deoxy-2'Fluoro
  misc_feature (6)..(11): 2'-O-methyl
  misc_feature (12)..(12): 2'-deoxy-2'Fluoro
  misc_feature (13)..(15): 2'-O-methyl
  misc_feature (16)..(16): 2'-deoxy-2'Fluoro
  misc_feature (17)..(17): 2'-O-methyl
  misc_feature (18)..(18): 2'-deoxy-2'Fluoro
  misc_feature (19)..(21): 2'-O-methyl
guugcagaaagcgaauguagu

SEQ ID NO: 1171 - RNA, 19 nt, Artificial Sequence
  Description of Artificial Sequence: Target Sequence/siNA sense region
cacagcaaccagaaacuca

SEQ ID NO: 1172 - RNA, 19 nt, Artificial Sequence
  Description of Artificial Sequence: Target Sequence/siNA antisense region
ugaguuucugguugcugug

SEQ ID NO: 1173 - DNA, 21 bp, Artificial Sequence
  Description of Artificial Sequence: Target Sequence/siNA sense region (stab00)
  misc_feature (1)..(19): ribonucleotide unmodified or modified as described for this sequence
cacagcaaccagaaacucatt

SEQ ID NO: 1174 - DNA, 21 bp, Artificial Sequence
  Description of Artificial Sequence: Target Sequence/siNA antisense region (stab00as)
  misc_feature (1)..(19): ribonucleotide unmodified or modified as described for this sequence
ugaguuucugguugcugugtt

SEQ ID NO: 1175 - DNA, 21 bp, Artificial Sequence
  Description of Artificial Sequence: Target Sequence/siNA sense region (stab04)
  misc_feature (1)..(1): 5'-3 attached terminal deoxyabasic moiety, inverted abasic, inverted nucleotide or other terminal cap that is optionally present
  misc_feature (21)..(21): 3'-3 attached terminal deoxyabasic moiety, inverted abasic, inverted nucleotide or other terminal cap that is optionally present
  misc_feature (1)..(1): 2'-deoxy-2'Fluoro
  misc_feature (3)..(3): 2'-deoxy-2'Fluoro
  misc_feature (6)..(6): 2'-deoxy-2'Fluoro
  misc_feature (9)..(10): 2'-deoxy-2'Fluoro
  misc_feature (16)..(18): 2'-deoxy-2'Fluoro
  misc_feature (1). .(19): ribonucleotide unmodified or modified as described for this sequence
cacagcaaccagaaacucatt

SEQ ID NO: 1176 - DNA, 21 bp, Artificial Sequence
  Description of Artificial Sequence: Target Sequence/siNA antisense region (stab05)
  misc_feature (1)..(1): 2'-deoxy-2'Fluoro
  misc_feature (5)..(9): 2'-deoxy-2'Fluoro
  misc_feature (12)..(13): 2'-deoxy-2'Fluoro
  misc_feature (15)..(16): 2'-deoxy-2'Fluoro
  misc_feature (18)..(18): 2'-deoxy-2'Fluoro
  misc_feature (20)..(20): Phosphorothioate or Phosphorodithioate 3'-Internucleotide Linkage (optionally present)
  misc_feature (1). .(19): ribonucleotide unmodified or modified as described for this sequence
ugaguuucugguugcugugtt

SEQ ID NO: 1177 - DNA, 21 bp, Artificial Sequence
  Description of Artificial Sequence: Target Sequence/siNA sense region (stab07)
  misc_feature (1)..(1): 5'-3 attached terminal deoxyabasic moiety, inverted abasic, inverted nucleotide or other terminal cap that is optionally present
  misc_feature (21)..(21): 3'-3 attached terminal deoxyabasic moiety, inverted abasic, inverted nucleotide or other terminal cap that is optionally present
  misc_feature (1)..(1): 2'-deoxy-2'Fluoro
  misc_feature (3)..(3): 2'-deoxy-2'Fluoro
  misc_feature (6)..(6): 2'-deoxy-2'Fluoro
  misc_feature (9)..(10): 2'-deoxy-2'Fluoro
  misc_feature (16)..(18): 2'-deoxy-2'Fluoro
cacagcaaccagaaacucatt

SEQ ID NO: 1178 - DNA, 21 bp, Artificial Sequence
  Description of Artificial Sequence: Target Sequence/siNA antisense region (stab08)
  misc_feature (1)..(1): 2'-deoxy-2'Fluoro
  misc_feature (2)..(4): 2'-O-methyl
  misc_feature (5)..(9): 2'-deoxy-2'Fluoro
  misc_feature (10)..(11): 2'-O-methyl
  misc_feature (12)..(13): 2'-deoxy-2'Fluoro
  misc_feature (14)..(14): 2'-O-methyl
  misc_feature (15)..(16): 2'-deoxy-2'Fluoro
  misc_feature (17)..(17): 2'-O-methyl
  misc_feature (18)..(18): 2'-deoxy-2'Fluoro
  misc_feature (19)..(19): 2'-O-methyl
  misc_feature (20)..(20): Phosphorothioate or Phosphorodithioate 3'-Internucleotide Linkage (optionally present)
  misc_feature (1)..(19): ribonucleotide unmodified or modified as described for this sequence
ugaguuucugguugcugugtt

SEQ ID NO: 1179 - DNA, 21 bp, Artificial Sequence
  Description of Artificial Sequence: Target Sequence/siNA sense region (stab09)
  misc_feature (1)..(1): 5'-3 attached terminal deoxyabasic moiety, inverted abasic, inverted nucleotide or other terminal cap that is optionally present
  misc_feature (21)..(21): 3'-3 attached terminal deoxyabasic moiety, inverted abasic, inverted nucleotide or other terminal cap that is optionally present
  misc_feature (1)..(19): ribonucleotide unmodified or modified as described for this sequence
cacagcaaccagaaacucatt

SEQ ID NO: 1180 - DNA, 21 bp, Artificial Sequence
  Description of Artificial Sequence: Target Sequence/siNA antisense region (stab10)
  misc_feature (20)..(20): Phosphorothioate or Phosphorodithioate 3'-Internucleotide Linkage (optionally present)
  misc_feature (1)..(19): ribonucleotide unmodified or modified as described for this sequence
ugaguuucugguugcugugtt

SEQ ID NO: 1181 - DNA, 21 bp, Artificial Sequence
  Description of Artificial Sequence: Target Sequence/siNA antisense region (stab19)
  misc_feature (21)..(21): 3'-3 attached terminal deoxyabasic moiety, inverted abasic, inverted nucleotide or other terminal cap that is optionally present
  misc_feature (1)..(1): 2'-deoxy-2'Fluoro
  misc_feature (2)..(4): 2'-O-methyl
  misc_feature (5)..(9): 2'-deoxy-2'Fluoro
  misc_feature (10)..(11): 2'-O-methyl
  misc_feature (12)..(13): 2'-deoxy-2'Fluoro
  misc_feature (14)..(14): 2'-O-methyl
  misc_feature (15)..(16): 2'-deoxy-2'Fluoro
  misc_feature (17)..(17): 2'-O-methyl
  misc_feature (18)..(18): 2'-deoxy-2'Fluoro
  misc_feature (19)..(19): 2'-O-methyl
  misc_feature (1)..(19): ribonucleotide unmodified or modified as described for this sequence
ugaguuucugguugcugugtt

SEQ ID NO: 1182 - DNA, 21 bp, Artificial Sequence
  Description of Artificial Sequence: Target Sequence/siNA antisense region (stab22)
  misc_feature (21)..(21): 3'-3 attached terminal deoxyabasic moiety, inverted abasic, inverted nucleotide or other terminal cap that is optionally present
  misc_feature (20)..(20): Phosphorothioate or Phosphorodithioate 3'-Internucleotide Linkage (optionally present)
  misc_feature (1)..(19): ribonucleotide unmodified or modified as described for this sequence
ugaguuucugguugcugugtt

SEQ ID NO: 1183 - DNA, 21 bp, Artificial Sequence
  Description of Artificial Sequence: Target Sequence/siNA antisense region (stab25)
  misc_feature (4)..(4): 2'-O-methyl
  misc_feature (5)..(9): 2'-deoxy-2'Fluoro
  misc_feature (10)..(11): 2'-O-methyl
  misc_feature (12)..(13): 2'-deoxy-2'Fluoro
  misc_feature (14)..(14): 2'-O-methyl
  misc_feature (15)..(16): 2'-deoxy-2'Fluoro
  misc_feature (17)..(17): 2'-O-methyl
  misc_feature (18)..(18): 2'-deoxy-2'Fluoro
  misc_feature (19)..(19): 2'-O-methyl
  misc_feature (20)..(20): Phosphorothioate or Phosphorodithioate 3'-Internucleotide Linkage (optionally present)
  misc_feature (1). .(19): ribonucleotide unmodified or modified as described for this sequence
ugaguuucugguugcugugtt

SEQ ID NO: 1184 - RNA, 21 nt, Artificial Sequence
  Description of Artificial Sequence: Target Sequence/siNA antisense region (stab35)
  misc_feature (4)..(4): 2'-O-methyl
  misc_feature (5)..(9): 2'-deoxy-2'Fluoro
  misc_feature (10)..(11): 2'-O-methyl
  misc_feature (12)..(13): 2'-deoxy-2'Fluoro
  misc_feature (14)..(14): 2'-O-methyl
  misc_feature (15)..(16): 2'-deoxy-2'Fluoro
  misc_feature (17)..(17): 2'-O-methyl
  misc_feature (18)..(18): 2'-deoxy-2'Fluoro
  misc_feature (19)..(21): 2'-O-methyl
ugaguuucugguugcuguguu

SEQ ID NO: 1185 - RNA, 21 nt, Artificial Sequence
  Description of Artificial Sequence: Target Sequence/siNA antisense region (stab36)
  misc_feature (4)..(4): 2'-O-methyl
  misc_feature (5)..(9): 2'-deoxy-2'Fluoro
  misc_feature (10)..(11): 2'-O-methyl
  misc_feature (12)..(13): 2'-deoxy-2'Fluoro
  misc_feature (14)..(14): 2'-O-methyl
  misc_feature (15)..(16): 2'-deoxy-2'Fluoro
  misc_feature (17)..(17): 2'-O-methyl
  misc_feature (18)..(18): 2'-deoxy-2'Fluoro
  misc_feature (19)..(21): 2'-O-methyl
ugaguuucugguugcuguguu

SEQ ID NO: 1186 - RNA, 19 nt, Artificial Sequence
  Description of Artificial Sequence: Target Sequence/siNA sense region
aagcaggagaaccuaaguc

SEQ ID NO: 1187 - RNA, 19 nt, Artificial Sequence
  Description of Artificial Sequence: Target Sequence/siNA antisense region
gacuuagguucuccugcuu

SEQ ID NO: 1188 - DNA, 21 bp, Artificial Sequence
  Description of Artificial Sequence: Target Sequence/siNA sense region (stab00)
  misc_feature (1)..(19): ribonucleotide unmodified or modified as described for this sequence
aagcaggagaaccuaaguctt

SEQ ID NO: 1189 - DNA, 21 bp, Artificial Sequence
  Description of Artificial Sequence: Target Sequence/siNA antisense region (stab00as)
  misc_feature (1). .(19): ribonucleotide unmodified or modified as described for this sequence
gacuuagguucuccugcuutt

SEQ ID NO: 1190 - DNA, 21 bp, Artificial Sequence
  Description of Artificial Sequence: Target Sequence/siNA sense region (stab04)
  misc_feature (1)..(1): 5'-3 attached terminal deoxyabasic moiety, inverted abasic, inverted nucleotide or other terminal cap that is optionally present
  misc_feature (21)..(21): 3'-3 attached terminal deoxyabasic moiety, inverted abasic, inverted nucleotide or other terminal cap that is optionally present
  misc_feature (4)..(4): 2'-deoxy-2'Fluoro
  misc_feature (12)..(14): 2'-deoxy-2'Fluoro
  misc_feature (18)..(19): 2'-deoxy-2'Fluoro
  misc_feature (1). .(19): ribonucleotide unmodified or modified as described for this sequence
aagcaggagaaccuaaguctt

SEQ ID NO: 1191 - DNA, 21 bp, Artificial Sequence
  Description of Artificial Sequence: Target Sequence/siNA antisense region (stab05)
  misc_feature (3)..(5): 2'-deoxy-2'Fluoro
  misc_feature (9)..(15): 2'-deoxy-2'Fluoro
  misc_feature (17)..(19): 2'-deoxy-2'Fluoro
  misc_feature (20)..(20): Phosphorothioate or Phosphorodithioate 3'-Internucleotide Linkage (optionally present)
  misc_feature (1). .(19): ribonucleotide unmodified or modified as described for this sequence
gacuuagguucuccugcuutt

SEQ ID NO: 1192 - DNA, 21 bp, Artificial Sequence
  Description of Artificial Sequence: Target Sequence/siNA sense region (stab07)
  misc_feature (1)..(1): 5'-3 attached terminal deoxyabasic moiety, inverted abasic, inverted nucleotide or other terminal cap that is optionally present
  misc_feature (21)..(21): 3'-3 attached terminal deoxyabasic moiety, inverted abasic, inverted nucleotide or other terminal cap that is optionally present
  misc_feature (4)..(4): 2'-deoxy-2'Fluoro
  misc_feature (12)..(14): 2'-deoxy-2'Fluoro
  misc_feature (18)..(19): 2'-deoxy-2'Fluoro
  misc_feature (1)..(19): ribonucleotide unmodified or modified as described for this sequence
aagcaggagaaccuaaguctt

SEQ ID NO: 1193 - DNA, 21 bp, Artificial Sequence
  Description of Artificial Sequence: Target Sequence/siNA antisense region (stab08)
  misc_feature (1)..(2): 2'-O-methyl
  misc_feature (3)..(5): 2'-deoxy-2'Fluoro
  misc_feature (6)..(8): 2'-O-methyl
  misc_feature (9)..(15): 2'-deoxy-2'Fluoro
  misc_feature (16)..(16): 2'-O-methyl
  misc_feature (17)..(19): 2'-deoxy-2'Fluoro
  misc_feature (20)..(20): Phosphorothioate or Phosphorodithioate 3'-Internucleotide Linkage (optionally present)
  misc_feature (1)..(19): ribonucleotide unmodified or modified as described for this sequence
gacuuagguucuccugcuutt

SEQ ID NO: 1194 - DNA, 21 bp, Artificial Sequence
  Description of Artificial Sequence: Target Sequence/siNA sense region (stab09)
  misc_feature (1)..(1): 5'-3 attached terminal deoxyabasic moiety, inverted abasic, inverted nucleotide or other terminal cap that is optionally present
  misc_feature (21)..(21): 3'-3 attached terminal deoxyabasic moiety, inverted abasic, inverted nucleotide or other terminal cap that is optionally present
  misc_feature (1)..(19): ribonucleotide unmodified or modified as described for this sequence
aagcaggagaaccuaaguctt

SEQ ID NO: 1195 - DNA, 21 bp, Artificial Sequence
  Description of Artificial Sequence: Target Sequence/siNA antisense region (stab10)
  misc_feature (20)..(20): Phosphorothioate or Phosphorodithioate 3'-Internucleotide Linkage (optionally present)
  misc_feature (1)..(19): ribonucleotide unmodified or modified as described for this sequence
gacuuagguucuccugcuutt

SEQ ID NO: 1196 - DNA, 21 bp, Artificial Sequence
  Description of Artificial Sequence: Target Sequence/siNA antisense region (stab19)
  misc_feature (21)..(21): 3'-3 attached terminal deoxyabasic moiety, inverted abasic, inverted nucleotide or other terminal cap that is optionally present
  misc_feature (1)..(2): 2'-O-methyl
  misc_feature (3)..(5): 2'-deoxy-2'Fluoro
  misc_feature (6)..(8): 2'-O-methyl
  misc_feature (9)..(15): 2'-deoxy-2'Fluoro
  misc_feature (16)..(16): 2'-O-methyl
  misc_feature (17)..(19): 2'-deoxy-2'Fluoro
  misc_feature (1)..(19): ribonucleotide unmodified or modified as described for this sequence
gacuuagguucuccugcuutt

SEQ ID NO: 1197 - DNA, 21 bp, Artificial Sequence
  Description of Artificial Sequence: Target Sequence/siNA antisense region (stab22)
  misc_feature (21)..(21): 3'-3 attached terminal deoxyabasic moiety, inverted abasic, inverted nucleotide or other terminal cap that is optionally present
  misc_feature (20)..(20): Phosphorothioate or Phosphorodithioate 3'-Internucleotide Linkage (optionally present)
  misc_feature (1)..(19): ribonucleotide unmodified or modified as described for this sequence
gacuuagguucuccugcuutt

SEQ ID NO: 1198 - DNA, 21 bp, Artificial Sequence
  Description of Artificial Sequence: Target Sequence/siNA antisense region (stab25)
  misc_feature (4)..(5): 2'-deoxy-2'Fluoro
  misc_feature (6)..(8): 2'-O-methyl
  misc_feature (9)..(15): 2'-deoxy-2'Fluoro
  misc_feature (16)..(16): 2'-O-methyl
  misc_feature (17)..(19): 2'-deoxy-2'Fluoro
  misc_feature (20)..(20): Phosphorothioate or Phosphorodithioate 3'-Internucleotide Linkage (optionally present)
  misc_feature (1). .(19): ribonucleotide unmodified or modified as described for this sequence
gacuuagguucuccugcuutt

SEQ ID NO: 1199 - RNA, 21 nt, Artificial Sequence
  Description of Artificial Sequence: Target Sequence/siNA antisense region (stab35)
  misc_feature (4)..(5): 2'-deoxy-2'Fluoro
  misc_feature (6)..(8): 2'-O-methyl
  misc_feature (9)..(15): 2'-deoxy-2'Fluoro
  misc_feature (16)..(16): 2'-O-methyl
  misc_feature (17)..(19): 2'-deoxy-2'Fluoro
  misc_feature (20)..(21): 2'-O-methyl
gacuuagguucuccugcuuuu

SEQ ID NO: 1200 - RNA, 21 nt, Artificial Sequence
  Description of Artificial Sequence: Target Sequence/siNA antisense region (stab36)
  misc_feature (4)..(5): 2'-deoxy-2'Fluoro
  misc_feature (6)..(8): 2'-O-methyl
  misc_feature (9)..(15): 2'-deoxy-2'Fluoro
  misc_feature (16)..(16): 2'-O-methyl
  misc_feature (17)..(19): 2'-deoxy-2'Fluoro
  misc_feature (20)..(21): 2'-O-methyl
gacuuagguucuccugcuuga

SEQ ID NO: 1201 - RNA, 19 nt, Artificial Sequence
  Description of Artificial Sequence: Target Sequence/siNA sense region
cugcgcacugcuguccaca

SEQ ID NO: 1202 - RNA, 19 nt, Artificial Sequence
  Description of Artificial Sequence: Target Sequence/siNA antisense region
uguggacagcagugcgcag

SEQ ID NO: 1203 - DNA, 21 bp, Artificial Sequence
  Description of Artificial Sequence: Target Sequence/siNA sense region (stab00)
  misc_feature (1)..(19): ribonucleotide unmodified or modified as described for this sequence
cugcgcacugcuguccacatt

SEQ ID NO: 1204 - DNA, 21 bp, Artificial Sequence
  Description of Artificial Sequence: Target Sequence/siNA antisense region (stab00as)
  misc_feature (1)..(19): ribonucleotide unmodified or modified as described for this sequence
uguggacagcagugcgcagtt

SEQ ID NO: 1205 - DNA, 21 bp, Artificial Sequence
  Description of Artificial Sequence: Target Sequence/siNA sense region (stab04)
  misc_feature (1)..(1): 5'-3 attached terminal deoxyabasic moiety, inverted abasic, inverted nucleotide or other terminal cap that is optionally present
  misc_feature (21)..(21): 3'-3 attached terminal deoxyabasic moiety, inverted abasic, inverted nucleotide or other terminal cap that is optionally present
  misc_feature (1)..(2): 2'-deoxy-2'Fluoro
  misc_feature (4)..(4): 2'-deoxy-2'Fluoro
  misc_feature (6)..(6): 2'-deoxy-2'Fluoro
  misc_feature (8)..(9): 2'-deoxy-2'Fluoro
  misc_feature (11)..(12): 2'-deoxy-2'Fluoro
  misc_feature (14)..(16): 2'-deoxy-2'Fluoro
  misc_feature (18)..(18): 2'-deoxy-2'Fluoro
  misc_feature (1). .(19): ribonucleotide unmodified or modified as described for this sequence
cugcgcacugcuguccacatt

SEQ ID NO: 1206 - DNA, 21 bp, Artificial Sequence
  Description of Artificial Sequence: Target Sequence/siNA antisense region (stab05)
  misc_feature (1)..(1): 2'-deoxy-2'Fluoro
  misc_feature (3)..(3): 2'-deoxy-2'Fluoro
  misc_feature (7)..(7): 2'-deoxy-2'Fluoro
  misc_feature (10)..(10): 2'-deoxy-2'Fluoro
  misc_feature (13)..(13): 2'-deoxy-2'Fluoro
  misc_feature (15)..(15): 2'-deoxy-2'Fluoro
  misc_feature (17)..(17): 2'-deoxy-2'Fluoro
  misc_feature (20)..(20): Phosphorothioate or Phosphorodithioate 3'-Internucleotide Linkage (optionally present)
  misc_feature (1). .(19): ribonucleotide unmodified or modified as described for this sequence
uguggacagcagugcgcagtt

SEQ ID NO: 1207 - DNA, 21 bp, Artificial Sequence
  Description of Artificial Sequence: Target Sequence/siNA sense region (stab07)
  misc_feature (1)..(1): 5'-3 attached terminal deoxyabasic moiety, inverted abasic, inverted nucleotide or other terminal cap that is optionally present
  misc_feature (21)..(21): 3'-3 attached terminal deoxyabasic moiety, inverted abasic, inverted nucleotide or other terminal cap that is optionally present
  misc_feature (1)..(2): 2'-deoxy-2'Fluoro
  misc_feature (4)..(4): 2'-deoxy-2'Fluoro
  misc_feature (6)..(6): 2'-deoxy-2'Fluoro
  misc_feature (8)..(9): 2'-deoxy-2'Fluoro
  misc_feature (11)..(12): 2'-deoxy-2'Fluoro
  misc_feature (14)..(16): 2'-deoxy-2'Fluoro
  misc_feature (18)..(18): 2'-deoxy-2'Fluoro
cugcgcacugcuguccacatt

SEQ ID NO: 1208 - DNA, 21 bp, Artificial Sequence
  Description of Artificial Sequence: Target Sequence/siNA antisense region (stab08)
  misc_feature (1)..(1): 2'-deoxy-2'Fluoro
  misc_feature (2)..(2): 2'-O-methyl
  misc_feature (3)..(3): 2'-deoxy-2'Fluoro
  misc_feature (4)..(6): 2'-O-methyl
  misc_feature (7)..(7): 2'-deoxy-2'Fluoro
  misc_feature (8)..(9): 2'-O-methyl
  misc_feature (10)..(10): 2'-deoxy-2'Fluoro
  misc_feature (11)..(12): 2'-O-methyl
  misc_feature (13)..(13): 2'-deoxy-2'Fluoro
  misc_feature (14)..(14): 2'-O-methyl
  misc_feature (15)..(15): 2'-deoxy-2'Fluoro
  misc_feature (16)..(16): 2'-O-methyl
  misc_feature (17)..(17): 2'-deoxy-2'Fluoro
  misc_feature (18)..(19): 2'-O-methyl
  misc_feature (20)..(20): Phosphorothioate or Phosphorodithioate 3'-Internucleotide Linkage (optionally present)
  misc_feature (1)..(19): ribonucleotide unmodified or modified as described for this sequence
uguggacagcagugcgcagtt

SEQ ID NO: 1209 - DNA, 21 bp, Artificial Sequence
  Description of Artificial Sequence: Target Sequence/siNA sense region (stab09)
  misc_feature (1)..(1): 5'-3 attached terminal deoxyabasic moiety, inverted abasic, inverted nucleotide or other terminal cap that is optionally present
  misc_feature (21)..(21): 3'-3 attached terminal deoxyabasic moiety, inverted abasic, inverted nucleotide or other terminal cap that is optionally present
  misc_feature (1)..(19): ribonucleotide unmodified or modified as described for this sequence
cugcgcacugcuguccacatt

SEQ ID NO: 1210 - DNA, 21 bp, Artificial Sequence
  Description of Artificial Sequence: Target Sequence/siNA antisense region (stab10)
  misc_feature (20)..(20): Phosphorothioate or Phosphorodithioate 3'-Internucleotide Linkage (optionally present)
  misc_feature (1)..(19): ribonucleotide unmodified or modified as described for this sequence
uguggacagcagugcgcagtt

SEQ ID NO: 1211 - DNA, 21 bp, Artificial Sequence
  Description of Artificial Sequence: Target Sequence/siNA antisense region (stab19)
  misc_feature (21)..(21): 3'-3 attached terminal deoxyabasic moiety, inverted abasic, inverted nucleotide or other terminal cap that is optionally present
  misc_feature (1)..(1): 2'-deoxy-2'Fluoro
  misc_feature (2)..(2): 2'-O-methyl
  misc_feature (3)..(3): 2'-deoxy-2'Fluoro
  misc_feature (4)..(6): 2'-O-methyl
  misc_feature (7)..(7): 2'-deoxy-2'Fluoro
  misc_feature (8)..(9): 2'-O-methyl
  misc_feature (10)..(10): 2'-deoxy-2'Fluoro
  misc_feature (11)..(12): 2'-O-methyl
  misc_feature (13)..(13): 2'-deoxy-2'Fluoro
  misc_feature (14)..(14): 2'-O-methyl
  misc_feature (15)..(15): 2'-deoxy-2'Fluoro
  misc_feature (16)..(16): 2'-O-methyl
  misc_feature (17)..(17): 2'-deoxy-2'Fluoro
  misc_feature (18)..(19): 2'-O-methyl
  misc_feature (1)..(19): ribonucleotide unmodified or modified as described for this sequence
uguggacagcagugcgcagtt

SEQ ID NO: 1212 - DNA, 21 bp, Artificial Sequence
  Description of Artificial Sequence: Target Sequence/siNA antisense region (stab22)
  misc_feature (21)..(21): 3'-3 attached terminal deoxyabasic moiety, inverted abasic, inverted nucleotide or other terminal cap that is optionally present
  misc_feature (20)..(20): Phosphorothioate or Phosphorodithioate 3'-Internucleotide Linkage (optionally present)
  misc_feature (1)..(19): ribonucleotide unmodified or modified as described for this sequence
uguggacagcagugcgcagtt

SEQ ID NO: 1213 - DNA, 21 bp, Artificial Sequence
  Description of Artificial Sequence: Target Sequence/siNA antisense region (stab25)
  misc_feature (4)..(6): 2'-O-methyl
  misc_feature (7)..(7): 2'-deoxy-2'Fluoro
  misc_feature (8)..(9): 2'-O-methyl
  misc_feature (10)..(10): 2'-deoxy-2'Fluoro
  misc_feature (11)..(12): 2'-O-methyl
  misc_feature (13)..(13): 2'-deoxy-2'Fluoro
  misc_feature (14)..(14): 2'-O-methyl
  misc_feature (15)..(15): 2'-deoxy-2'Fluoro
  misc_feature (16)..(16): 2'-O-methyl
  misc_feature (17)..(17): 2'-deoxy-2'Fluoro
  misc_feature (18)..(19): 2'-O-methyl
  misc_feature (20)..(20): Phosphorothioate or Phosphorodithioate 3'-Internucleotide Linkage (optionally present)
  misc_feature (1). .(19): ribonucleotide unmodified or modified as described for this sequence
uguggacagcagugcgcagtt

SEQ ID NO: 1214 - RNA, 21 nt, Artificial Sequence
  Description of Artificial Sequence: Target Sequence/siNA antisense region (stab35)
  misc_feature (4)..(6): 2'-O-methyl
  misc_feature (7)..(7): 2'-deoxy-2'Fluoro
  misc_feature (8)..(9): 2'-O-methyl
  misc_feature (10)..(10): 2'-deoxy-2'Fluoro
  misc_feature (11)..(12): 2'-O-methyl
  misc_feature (13)..(13): 2'-deoxy-2'Fluoro
  misc_feature (14)..(14): 2'-O-methyl
  misc_feature (15)..(15): 2'-deoxy-2'Fluoro
  misc_feature (16)..(16): 2'-O-methyl
  misc_feature (17)..(17): 2'-deoxy-2'Fluoro
  misc_feature (18)..(21): 2'-O-methyl
uguggacagcagugcgcaguu

SEQ ID NO: 1215 - RNA, 21 nt, Artificial Sequence
  Description of Artificial Sequence: Target Sequence/siNA antisense region (stab36)
  misc_feature (4)..(6): 2'-O-methyl
  misc_feature (7)..(7): 2'-deoxy-2'Fluoro
  misc_feature (8)..(9): 2'-O-methyl
  misc_feature (10)..(10): 2'-deoxy-2'Fluoro
  misc_feature (11)..(12): 2'-O-methyl
  misc_feature (13)..(13): 2'-deoxy-2'Fluoro
  misc_feature (14)..(14): 2'-O-methyl
  misc_feature (15)..(15): 2'-deoxy-2'Fluoro
  misc_feature (16)..(16): 2'-O-methyl
  misc_feature (17)..(17): 2'-deoxy-2'Fluoro
  misc_feature (18)..(21): 2'-O-methyl
uguggacagcagugcgcagac

SEQ ID NO: 1216 - RNA, 19 nt, Artificial Sequence
  Description of Artificial Sequence: Target Sequence/siNA sense region
aaaagcaaaucucugaagg

SEQ ID NO: 1217 - RNA, 19 nt, Artificial Sequence
  Description of Artificial Sequence: Target Sequence/siNA antisense region
ccuucagagauuugcuuuu

SEQ ID NO: 1218 - DNA, 21 bp, Artificial Sequence
  Description of Artificial Sequence: Target Sequence/siNA sense region (stab00)
  misc_feature (1)..(19): ribonucleotide unmodified or modified as described for this sequence
aaaagcaaaucucugaaggtt

SEQ ID NO: 1219 - DNA, 21 bp, Artificial Sequence
  Description of Artificial Sequence: Target Sequence/siNA antisense region (stab00as)
  misc_feature (1)..(19): ribonucleotide unmodified or modified as described for this sequence
ccuucagagauuugcuuuutt

SEQ ID NO: 1220 - DNA, 21 bp, Artificial Sequence
  Description of Artificial Sequence: Target Sequence/siNA sense region (stab04)
  misc_feature (1)..(1): 5'-3 attached terminal deoxyabasic moiety, inverted abasic, inverted nucleotide or other terminal cap that is optionally present
  misc_feature (21)..(21): 3'-3 attached terminal deoxyabasic moiety, inverted abasic, inverted nucleotide or other terminal cap that is optionally present
  misc_feature (6)..(6): 2'-deoxy-2'Fluoro
  misc_feature (10)..(14): 2'-deoxy-2'Fluoro
  misc_feature (1). .(19): ribonucleotide unmodified or modified as described for this sequence
aaaagcaaaucucugaaggtt

SEQ ID NO: 1221 - DNA, 21 bp, Artificial Sequence
  Description of Artificial Sequence: Target Sequence/siNA antisense region (stab05)
  misc_feature (1)..(5): 2'-deoxy-2'Fluoro
  misc_feature (11)..(13): 2'-deoxy-2'Fluoro
  misc_feature (15)..(19): 2'-deoxy-2'Fluoro
  misc_feature (20)..(20): Phosphorothioate or Phosphorodithioate 3'-Internucleotide Linkage (optionally present)
  misc_feature (1). .(19): ribonucleotide unmodified or modified as described for this sequence
ccuucagagauuugcuuuutt

SEQ ID NO: 1222 - DNA, 21 bp, Artificial Sequence
  Description of Artificial Sequence: Target Sequence/siNA sense region (stab07)
  misc_feature (1)..(1): 5'-3 attached terminal deoxyabasic moiety, inverted abasic, inverted nucleotide or other terminal cap that is optionally present
  misc_feature (21)..(21): 3'-3 attached terminal deoxyabasic moiety, inverted abasic, inverted nucleotide or other terminal cap that is optionally present
  misc_feature (6)..(6): 2'-deoxy-2'Fluoro
  misc_feature (10)..(14): 2'-deoxy-2'Fluoro
  misc_feature (1)..(19): ribonucleotide unmodified or modified as described for this sequence
aaaagcaaaucucugaaggtt

SEQ ID NO: 1223 - DNA, 21 bp, Artificial Sequence
  Description of Artificial Sequence: Target Sequence/siNA antisense region (stab08)
  misc_feature (1)..(5): 2'-deoxy-2'Fluoro
  misc_feature (6)..(10): 2'-O-methyl
  misc_feature (11)..(13): 2'-deoxy-2'Fluoro
  misc_feature (14)..(14): 2'-O-methyl
  misc_feature (15)..(19): 2'-deoxy-2'Fluoro
  misc_feature (20)..(20): Phosphorothioate or Phosphorodithioate 3'-Internucleotide Linkage (optionally present)
  misc_feature (1)..(19): ribonucleotide unmodified or modified as described for this sequence
ccuucagagauuugcuuuutt

SEQ ID NO: 1224 - DNA, 21 bp, Artificial Sequence
  Description of Artificial Sequence: Target Sequence/siNA sense region (stab09)
  misc_feature (1)..(1): 5'-3 attached terminal deoxyabasic moiety, inverted abasic, inverted nucleotide or other terminal cap that is optionally present
  misc_feature (21)..(21): 3'-3 attached terminal deoxyabasic moiety, inverted abasic, inverted nucleotide or other terminal cap that is optionally present
  misc_feature (1)..(19): ribonucleotide unmodified or modified as described for this sequence
aaaagcaaaucucugaaggtt

SEQ ID NO: 1225 - DNA, 21 bp, Artificial Sequence
  Description of Artificial Sequence: Target Sequence/siNA antisense region (stab10)
  misc_feature (20)..(20): Phosphorothioate or Phosphorodithioate 3'-Internucleotide Linkage (optionally present)
  misc_feature (1)..(19): ribonucleotide unmodified or modified as described for this sequence
ccuucagagauuugcuuuutt

SEQ ID NO: 1226 - DNA, 21 bp, Artificial Sequence
  Description of Artificial Sequence: Target Sequence/siNA antisense region (stab19)
  misc_feature (21)..(21): 3'-3 attached terminal deoxyabasic moiety, inverted abasic, inverted nucleotide or other terminal cap that is optionally present
  misc_feature (1)..(5): 2'-deoxy-2'Fluoro
  misc_feature (6)..(10): 2'-O-methyl
  misc_feature (11)..(13): 2'-deoxy-2'Fluoro
  misc_feature (14)..(14): 2'-O-methyl
  misc_feature (15)..(19): 2'-deoxy-2'Fluoro
  misc_feature (1)..(19): ribonucleotide unmodified or modified as described for this sequence
ccuucagagauuugcuuuutt

SEQ ID NO: 1227 - DNA, 21 bp, Artificial Sequence
  Description of Artificial Sequence: Target Sequence/siNA antisense region (stab22)
  misc_feature (21)..(21): 3'-3 attached terminal deoxyabasic moiety, inverted abasic, inverted nucleotide or other terminal cap that is optionally present
  misc_feature (20)..(20): Phosphorothioate or Phosphorodithioate 3'-Internucleotide Linkage (optionally present)
  misc_feature (1)..(19): ribonucleotide unmodified or modified as described for this sequence
ccuucagagauuugcuuuutt

SEQ ID NO: 1228 - DNA, 21 bp, Artificial Sequence
  Description of Artificial Sequence: Target Sequence/siNA antisense region (stab25)
  misc_feature (4)..(5): 2'-deoxy-2'Fluoro
  misc_feature (6)..(10): 2'-O-methyl
  misc_feature (11)..(13): 2'-deoxy-2'Fluoro
  misc_feature (14)..(14): 2'-O-methyl
  misc_feature (15)..(19): 2'-deoxy-2'Fluoro
  misc_feature (20)..(20): Phosphorothioate or Phosphorodithioate 3'-Internucleotide Linkage (optionally present)
  misc_feature (1). .(19): ribonucleotide unmodified or modified as described for this sequence
ccuucagagauuugcuuuutt

SEQ ID NO: 1229 - RNA, 21 nt, Artificial Sequence
  Description of Artificial Sequence: Target Sequence/siNA antisense region (stab35)
  misc_feature (4)..(5): 2'-deoxy-2'Fluoro
  misc_feature (6)..(10): 2'-O-methyl
  misc_feature (11)..(13): 2'-deoxy-2'Fluoro
  misc_feature (14)..(14): 2'-O-methyl
  misc_feature (15)..(19): 2'-deoxy-2'Fluoro
  misc_feature (20)..(21): 2'-O-methyl
ccuucagagauuugcuuuuuu

SEQ ID NO: 1230 - RNA, 21 nt, Artificial Sequence
  Description of Artificial Sequence: Target Sequence/siNA antisense region (stab36)
  misc_feature (4)..(5): 2'-deoxy-2'Fluoro
  misc_feature (6)..(10): 2'-O-methyl
  misc_feature (11)..(13): 2'-deoxy-2'Fluoro
  misc_feature (14)..(14): 2'-O-methyl
  misc_feature (15)..(19): 2'-deoxy-2'Fluoro
  misc_feature (20)..(21): 2'-O-methyl
ccuucagagauuugcuuuugu

SEQ ID NO: 1231 - RNA, 19 nt, Artificial Sequence
  Description of Artificial Sequence: Target Sequence/siNA sense region
gaucuggugucggccugug

SEQ ID NO: 1232 - RNA, 19 nt, Artificial Sequence
  Description of Artificial Sequence: Target Sequence/siNA antisense region
cacaggccgacaccagauc

SEQ ID NO: 1233 - DNA, 21 bp, Artificial Sequence
  Description of Artificial Sequence: Target Sequence/siNA sense region (stab00)
  misc_feature (1)..(19): ribonucleotide unmodified or modified as described for this sequence
gaucuggugucggccugugtt

SEQ ID NO: 1234 - DNA, 21 bp, Artificial Sequence
  Description of Artificial Sequence: Target Sequence/siNA antisense region (stab00as)
  misc_feature (1)..(19): ribonucleotide unmodified or modified as described for this sequence
cacaggccgacaccagauctt

SEQ ID NO: 1235 - DNA, 21 bp, Artificial Sequence
  Description of Artificial Sequence: Target Sequence/siNA sense region (stab04)
  misc_feature (1)..(1): 5'-3 attached terminal deoxyabasic moiety, inverted abasic, inverted nucleotide or other terminal cap that is optionally present
  misc_feature (21)..(21): 3'-3 attached terminal deoxyabasic moiety, inverted abasic, inverted nucleotide or other terminal cap that is optionally present
  misc_feature (3)..(5): 2'-deoxy-2'Fluoro
  misc_feature (8)..(8): 2'-deoxy-2'Fluoro
  misc_feature (10)..(11): 2'-deoxy-2'Fluoro
  misc_feature (14)..(16): 2'-deoxy-2'Fluoro
  misc_feature (18)..(18): 2'-deoxy-2'Fluoro
  misc_feature (1)..(19): ribonucleotide unmodified or modified as described for this sequence
gaucuggugucggccugugtt

SEQ ID NO: 1236 - DNA, 21 bp, Artificial Sequence
  Description of Artificial Sequence: Target Sequence/siNA antisense region (stab05)
  misc_feature (1)..(1): 2'-deoxy-2'Fluoro
  misc_feature (3)..(3): 2'-deoxy-2'Fluoro
  misc_feature (7)..(8): 2'-deoxy-2'Fluoro
  misc_feature (11)..(11): 2'-deoxy-2'Fluoro
  misc_feature (13)..(14): 2'-deoxy-2'Fluoro
  misc_feature (18)..(19): 2'-deoxy-2'Fluoro
  misc_feature (20)..(20): Phosphorothioate or Phosphorodithioate 3'-Internucleotide Linkage (optionally present)
  misc_feature (1)..(19): ribonucleotide unmodified or modified as described for this sequence
cacaggccgacaccagauctt

SEQ ID NO: 1237 - DNA, 21 bp, Artificial Sequence
  Description of Artificial Sequence: Target Sequence/siNA sense region (stab07)
  misc_feature (1)..(1): 5'-3 attached terminal deoxyabasic moiety, inverted abasic, inverted nucleotide or other terminal cap that is optionally present
  misc_feature (21)..(21): 3'-3 attached terminal deoxyabasic moiety, inverted abasic, inverted nucleotide or other terminal cap that is optionally present
  misc_feature (3)..(5): 2'-deoxy-2'Fluoro
  misc_feature (8)..(8): 2'-deoxy-2'Fluoro
  misc_feature (10)..(11): 2'-deoxy-2'Fluoro
  misc_feature (14)..(16): 2'-deoxy-2'Fluoro
  misc_feature (18)..(18): 2'-deoxy-2'Fluoro
  misc_feature (1)..(19): ribonucleotide unmodified or modified as described for this sequence
gaucuggugucggccugugtt

SEQ ID NO: 1238 - DNA, 21 bp, Artificial Sequence
  Description of Artificial Sequence: Target Sequence/siNA antisense region (stab08)
  misc_feature (1)..(1): 2'-deoxy-2'Fluoro
  misc_feature (2)..(2): 2'-O-methyl
  misc_feature (3)..(3): 2'-deoxy-2'Fluoro
  misc_feature (4)..(6): 2'-O-methyl
  misc_feature (7)..(8): 2'-deoxy-2'Fluoro
  misc_feature (9)..(10): 2'-O-methyl
  misc_feature (11)..(11): 2'-deoxy-2'Fluoro
  misc_feature (12)..(12): 2'-O-methyl
  misc_feature (13)..(14): 2'-deoxy-2'Fluoro
  misc_feature (15)..(17): 2'-O-methyl
  misc_feature (18)..(19): 2'-deoxy-2'Fluoro
  misc_feature (20)..(20): Phosphorothioate or Phosphorodithioate 3'-Internucleotide Linkage (optionally present)
  misc_feature (1)..(19): ribonucleotide unmodified or modified as described for this sequence
cacaggccgacaccagauctt

SEQ ID NO: 1239 - DNA, 21 bp, Artificial Sequence
  Description of Artificial Sequence: Target Sequence/siNA sense region (stab09)
  misc_feature (1)..(1): 5'-3 attached terminal deoxyabasic moiety, inverted abasic, inverted nucleotide or other terminal cap that is optionally present
  misc_feature (21)..(21): 3'-3 attached terminal deoxyabasic moiety, inverted abasic, inverted nucleotide or other terminal cap that is optionally present
  misc_feature (1)..(19): ribonucleotide unmodified or modified as described for this sequence
gaucuggugucggccugugtt

SEQ ID NO: 1240 - DNA, 21 bp, Artificial Sequence
  Description of Artificial Sequence: Target Sequence/siNA antisense region (stab10)
  misc_feature (20)..(20): Phosphorothioate or Phosphorodithioate 3'-Internucleotide Linkage (optionally present)
  misc_feature (1)..(19): ribonucleotide unmodified or modified as described for this sequence
cacaggccgacaccagauctt

SEQ ID NO: 1241 - DNA, 21 bp, Artificial Sequence
  Description of Artificial Sequence: Target Sequence/siNA antisense region (stab19)
  misc_feature (21)..(21): 3'-3 attached terminal deoxyabasic moiety, inverted abasic, inverted nucleotide or other terminal cap that is optionally present
  misc_feature (1)..(1): 2'-deoxy-2'Fluoro
  misc_feature (2)..(2): 2'-O-methyl
  misc_feature (3)..(3): 2'-deoxy-2'Fluoro
  misc_feature (4)..(6): 2'-O-methyl
  misc_feature (7)..(8): 2'-deoxy-2'Fluoro
  misc_feature (9)..(10): 2'-O-methyl
  misc_feature (11)..(11): 2'-deoxy-2'Fluoro
  misc_feature (12)..(12): 2'-O-methyl
  misc_feature (13)..(14): 2'-deoxy-2'Fluoro
  misc_feature (15)..(17): 2'-O-methyl
  misc_feature (18)..(19): 2'-deoxy-2'Fluoro
  misc_feature (1)..(19): ribonucleotide unmodified or modified as described for this sequence
cacaggccgacaccagauctt

SEQ ID NO: 1242 - DNA, 21 bp, Artificial Sequence
  Description of Artificial Sequence: Target Sequence/siNA antisense region (stab22)
  misc_feature (21)..(21): 3'-3 attached terminal deoxyabasic moiety, inverted abasic, inverted nucleotide or other terminal cap that is optionally present
  misc_feature (20)..(20): Phosphorothioate or Phosphorodithioate 3'-Internucleotide Linkage (optionally present)
  misc_feature (1)..(19): ribonucleotide unmodified or modified as described for this sequence
cacaggccgacaccagauctt

SEQ ID NO: 1243 - DNA, 21 bp, Artificial Sequence
  Description of Artificial Sequence: Target Sequence/siNA antisense region (stab25)
  misc_feature (4)..(6): 2'-O-methyl
  misc_feature (7)..(8): 2'-deoxy-2'Fluoro
  misc_feature (9)..(10): 2'-O-methyl
  misc_feature (11)..(11): 2'-deoxy-2'Fluoro
  misc_feature (12)..(12): 2'-O-methyl
  misc_feature (13)..(14): 2'-deoxy-2'Fluoro
  misc_feature (15)..(17): 2'-O-methyl
  misc_feature (18)..(19): 2'-deoxy-2'Fluoro
  misc_feature (20)..(20): Phosphorothioate or Phosphorodithioate 3'-Internucleotide Linkage (optionally present)
  misc_feature (1). .(19): ribonucleotide unmodified or modified as described for this sequence
cacaggccgacaccagauctt

SEQ ID NO: 1244 - RNA, 21 nt, Artificial Sequence
  Description of Artificial Sequence: Target Sequence/siNA antisense region (stab35)
  misc_feature (4)..(6): 2'-O-methyl
  misc_feature (7)..(8): 2'-deoxy-2'Fluoro
  misc_feature (9)..(10): 2'-O-methyl
  misc_feature (11)..(11): 2'-deoxy-2'Fluoro
  misc_feature (12)..(12): 2'-O-methyl
  misc_feature (13)..(14): 2'-deoxy-2'Fluoro
  misc_feature (15)..(17): 2'-O-methyl
  misc_feature (18)..(19): 2'-deoxy-2'Fluoro
  misc_feature (20)..(21): 2'-O-methyl
cacaggccgacaccagaucuu

SEQ ID NO: 1245 - RNA, 21 nt, Artificial Sequence
  Description of Artificial Sequence: Target Sequence/siNA antisense region (stab36)
  misc_feature (4)..(6): 2'-O-methyl
  misc_feature (7)..(8): 2'-deoxy-2'Fluoro
  misc_feature (9)..(10): 2'-O-methyl
  misc_feature (11)..(11): 2'-deoxy-2'Fluoro
  misc_feature (12)..(12): 2'-O-methyl
  misc_feature (13)..(14): 2'-deoxy-2'Fluoro
  misc_feature (15)..(17): 2'-O-methyl
  misc_feature (18)..(19): 2'-deoxy-2'Fluoro
  misc_feature (20)..(21): 2'-O-methyl
cacaggccgacaccagauccu

SEQ ID NO: 1246 - RNA, 19 nt, Artificial Sequence
  Description of Artificial Sequence: Target Sequence/siNA sense region
ggcaguggagggaacacag

SEQ ID NO: 1247 - RNA, 19 nt, Artificial Sequence
  Description of Artificial Sequence: Target Sequence/siNA antisense region
cuguguucccuccacugcc

SEQ ID NO: 1248 - DNA, 21 bp, Artificial Sequence
  Description of Artificial Sequence: Target Sequence/siNA sense region (stab00)
  misc_feature (1)..(19): ribonucleotide unmodified or modified as described for this sequence
ggcaguggagggaacacagtt

SEQ ID NO: 1249 - DNA, 21 bp, Artificial Sequence
  Description of Artificial Sequence: Target Sequence/siNA antisense region (stab00as)
  misc_feature (1)..(19): ribonucleotide unmodified or modified as described for this sequence
cuguguucccuccacugcctt

SEQ ID NO: 1250 - DNA, 21 bp, Artificial Sequence
  Description of Artificial Sequence: Target Sequence/siNA sense region (stab04)
  misc_feature (1)..(1): 5'-3 attached terminal deoxyabasic moiety, inverted abasic, inverted nucleotide or other terminal cap that is optionally present
  misc_feature (21)..(21): 3'-3 attached terminal deoxyabasic moiety, inverted abasic, inverted nucleotide or other terminal cap that is optionally present
  misc_feature (3)..(3): 2'-deoxy-2'Fluoro
  misc_feature (6)..(6): 2'-deoxy-2'Fluoro
  misc_feature (15)..(15): 2'-deoxy-2'Fluoro
  misc_feature (17)..(17): 2'-deoxy-2'Fluoro
  misc_feature (1). .(19): ribonucleotide unmodified or modified as described for this sequence
ggcaguggagggaacacagtt

SEQ ID NO: 1251 - DNA, 21 bp, Artificial Sequence
  Description of Artificial Sequence: Target Sequence/siNA antisense region (stab05)
  misc_feature (1)..(2): 2'-deoxy-2'Fluoro
  misc_feature (4)..(4): 2'-deoxy-2'Fluoro
  misc_feature (6)..(13): 2'-deoxy-2'Fluoro
  misc_feature (15)..(16): 2'-deoxy-2'Fluoro
  misc_feature (18)..(19): 2'-deoxy-2'Fluoro
  misc_feature (20)..(20): Phosphorothioate or Phosphorodithioate 3'-Internucleotide Linkage (optionally present)
  misc_feature (1). .(19): ribonucleotide unmodified or modified as described for this sequence
cuguguucccuccacugcctt

SEQ ID NO: 1252 - DNA, 21 bp, Artificial Sequence
  Description of Artificial Sequence: Target Sequence/siNA sense region (stab07)
  misc_feature (1)..(1): 5'-3 attached terminal deoxyabasic moiety, inverted abasic, inverted nucleotide or other terminal cap that is optionally present
  misc_feature (21)..(21): 3'-3 attached terminal deoxyabasic moiety, inverted abasic, inverted nucleotide or other terminal cap that is optionally present
  misc_feature (3)..(3): 2'-deoxy-2'Fluoro
  misc_feature (6)..(6): 2'-deoxy-2'Fluoro
  misc_feature (15)..(15): 2'-deoxy-2'Fluoro
  misc_feature (17)..(17): 2'-deoxy-2'Fluoro
  misc_feature (1)..(19): ribonucleotide unmodified or modified as described for this sequence
ggcaguggagggaacacagtt

SEQ ID NO: 1253 - DNA, 21 bp, Artificial Sequence
  Description of Artificial Sequence: Target Sequence/siNA antisense region (stab08)
  misc_feature (1)..(2): 2'-deoxy-2'Fluoro
  misc_feature (3)..(3): 2'-O-methyl
  misc_feature (4)..(4): 2'-deoxy-2'Fluoro
  misc_feature (5)..(5): 2'-O-methyl
  misc_feature (6)..(13): 2'-deoxy-2'Fluoro
  misc_feature (14)..(14): 2'-O-methyl
  misc_feature (15)..(16): 2'-deoxy-2'Fluoro
  misc_feature (17)..(17): 2'-O-methyl
  misc_feature (18)..(19): 2'-deoxy-2'Fluoro
  misc_feature (20)..(20): Phosphorothioate or Phosphorodithioate 3'-Internucleotide Linkage (optionally present)
  misc_feature (1)..(19): ribonucleotide unmodified or modified as described for this sequence
cuguguucccuccacugcctt

SEQ ID NO: 1254 - DNA, 21 bp, Artificial Sequence
  Description of Artificial Sequence: Target Sequence/siNA sense region (stab09)
  misc_feature (1)..(1): 5'-3 attached terminal deoxyabasic moiety, inverted abasic, inverted nucleotide or other terminal cap that is optionally present
  misc_feature (21)..(21): 3'-3 attached terminal deoxyabasic moiety, inverted abasic, inverted nucleotide or other terminal cap that is optionally present
  misc_feature (1)..(19): ribonucleotide unmodified or modified as described for this sequence
ggcaguggagggaacacagtt

SEQ ID NO: 1255 - DNA, 21 bp, Artificial Sequence
  Description of Artificial Sequence: Target Sequence/siNA antisense region (stab10)
  misc_feature (20)..(20): Phosphorothioate or Phosphorodithioate 3'-Internucleotide Linkage (optionally present)
  misc_feature (1)..(19): ribonucleotide unmodified or modified as described for this sequence
cuguguucccuccacugcctt

SEQ ID NO: 1256 - DNA, 21 bp, Artificial Sequence
  Description of Artificial Sequence: Target Sequence/siNA antisense region (stab19)
  misc_feature (21)..(21): 3'-3 attached terminal deoxyabasic moiety, inverted abasic, inverted nucleotide or other terminal cap that is optionally present
  misc_feature (1)..(2): 2'-deoxy-2'Fluoro
  misc_feature (3)..(3): 2'-O-methyl
  misc_feature (4)..(4): 2'-deoxy-2'Fluoro
  misc_feature (5)..(5): 2'-O-methyl
  misc_feature (6)..(13): 2'-deoxy-2'Fluoro
  misc_feature (14)..(14): 2'-O-methyl
  misc_feature (15)..(16): 2'-deoxy-2'Fluoro
  misc_feature (17)..(17): 2'-O-methyl
  misc_feature (18)..(19): 2'-deoxy-2'Fluoro
  misc_feature (1)..(19): ribonucleotide unmodified or modified as described for this sequence
cuguguucccuccacugcctt

SEQ ID NO: 1257 - DNA, 21 bp, Artificial Sequence
  Description of Artificial Sequence: Target Sequence/siNA antisense region (stab22)
  misc_feature (21)..(21): 3'-3 attached terminal deoxyabasic moiety, inverted abasic, inverted nucleotide or other terminal cap that is optionally present
  misc_feature (20)..(20): Phosphorothioate or Phosphorodithioate 3'-Internucleotide Linkage (optionally present)
  misc_feature (1)..(19): ribonucleotide unmodified or modified as described for this sequence
cuguguucccuccacugcctt

SEQ ID NO: 1258 - DNA, 21 bp, Artificial Sequence
  Description of Artificial Sequence: Target Sequence/siNA antisense region (stab25)
  misc_feature (4)..(4): 2'-deoxy-2'Fluoro
  misc_feature (5)..(5): 2'-O-methyl
  misc_feature (6)..(13): 2'-deoxy-2'Fluoro
  misc_feature (14)..(14): 2'-O-methyl
  misc_feature (15)..(16): 2'-deoxy-2'Fluoro
  misc_feature (17)..(17): 2'-O-methyl
  misc_feature (18)..(19): 2'-deoxy-2'Fluoro
  misc_feature (20)..(20): Phosphorothioate or Phosphorodithioate 3'-Internucleotide Linkage (optionally present)
  misc_feature (1). .(19): ribonucleotide unmodified or modified as described for this sequence
cuguguucccuccacugcctt

SEQ ID NO: 1259 - RNA, 21 nt, Artificial Sequence
  Description of Artificial Sequence: Target Sequence/siNA antisense region (stab35)
  misc_feature (4)..(4): 2'-deoxy-2'Fluoro
  misc_feature (5)..(5): 2'-O-methyl
  misc_feature (6)..(13): 2'-deoxy-2'Fluoro
  misc_feature (14)..(14): 2'-O-methyl
  misc_feature (15)..(16): 2'-deoxy-2'Fluoro
  misc_feature (17)..(17): 2'-O-methyl
  misc_feature (18)..(19): 2'-deoxy-2'Fluoro
  misc_feature (20)..(21): 2'-O-methyl
cuguguucccuccacugccuu

SEQ ID NO: 1260 - RNA, 21 nt, Artificial Sequence
  Description of Artificial Sequence: Target Sequence/siNA antisense region (stab36)
  misc_feature (4)..(4): 2'-deoxy-2'Fluoro
  misc_feature (5)..(5): 2'-O-methyl
  misc_feature (6)..(13): 2'-deoxy-2'Fluoro
  misc_feature (14)..(14): 2'-O-methyl
  misc_feature (15)..(16): 2'-deoxy-2'Fluoro
  misc_feature (17)..(17): 2'-O-methyl
  misc_feature (18)..(19): 2'-deoxy-2'Fluoro
  misc_feature (20)..(21): 2'-O-methyl
cuguguucccuccacugccac

SEQ ID NO: 1261 - RNA, 19 nt, Artificial Sequence
  Description of Artificial Sequence: Target Sequence/siNA sense region
gacgugcucauggagggcg

SEQ ID NO: 1262 - RNA, 19 nt, Artificial Sequence
  Description of Artificial Sequence: Target Sequence/siNA antisense region
cgcccuccaugagcacguc

SEQ ID NO: 1263 - DNA, 21 bp, Artificial Sequence
  Description of Artificial Sequence: Target Sequence/siNA sense region (stab00)
  misc_feature (1)..(19): ribonucleotide unmodified or modified as described for this sequence
gacgugcucauggagggcgtt

SEQ ID NO: 1264 - DNA, 21 bp, Artificial Sequence
  Description of Artificial Sequence: Target Sequence/siNA antisense region (stab00as)
  misc_feature (1)..(19): ribonucleotide unmodified or modified as described for this sequence
cgcccuccaugagcacguctt

SEQ ID NO: 1265 - DNA, 21 bp, Artificial Sequence
  Description of Artificial Sequence: Target Sequence/siNA sense region (stab04)
  misc_feature (1)..(1): 5'-3 attached terminal deoxyabasic moiety, inverted abasic, inverted nucleotide or other terminal cap that is optionally present
  misc_feature (21)..(21): 3'-3 attached terminal deoxyabasic moiety, inverted abasic, inverted nucleotide or other terminal cap that is optionally present
  misc_feature (3)..(3): 2'-deoxy-2'Fluoro
  misc_feature (5)..(5): 2'-deoxy-2'Fluoro
  misc_feature (7)..(9): 2'-deoxy-2'Fluoro
  misc_feature (11)..(11): 2'-deoxy-2'Fluoro
  misc_feature (18)..(18): 2'-deoxy-2'Fluoro
  misc_feature (1). .(19): ribonucleotide unmodified or modified as described for this sequence
gacgugcucauggagggcgtt

SEQ ID NO: 1266 - DNA, 21 bp, Artificial Sequence
  Description of Artificial Sequence: Target Sequence/siNA antisense region (stab05)
  misc_feature (1)..(1): 2'-deoxy-2'Fluoro
  misc_feature (3)..(8): 2'-deoxy-2'Fluoro
  misc_feature (10)..(10): 2'-deoxy-2'Fluoro
  misc_feature (14)..(14): 2'-deoxy-2'Fluoro
  misc_feature (16)..(16): 2'-deoxy-2'Fluoro
  misc_feature (18)..(19): 2'-deoxy-2'Fluoro
  misc_feature (20)..(20): Phosphorothioate or Phosphorodithioate 3'-Internucleotide Linkage (optionally present)
  misc_feature (1). .(19): ribonucleotide unmodified or modified as described for this sequence
cgcccuccaugagcacguctt

SEQ ID NO: 1267 - DNA, 21 bp, Artificial Sequence
  Description of Artificial Sequence: Target Sequence/siNA sense region (stab07)
  misc_feature (1)..(1): 5'-3 attached terminal deoxyabasic moiety, inverted abasic, inverted nucleotide or other terminal cap that is optionally present
  misc_feature (21)..(21): 3'-3 attached terminal deoxyabasic moiety, inverted abasic, inverted nucleotide or other terminal cap that is optionally present
  misc_feature (3)..(3): 2'-deoxy-2'Fluoro
  misc_feature (5)..(5): 2'-deoxy-2'Fluoro
  misc_feature (7)..(9): 2'-deoxy-2'Fluoro
  misc_feature (11)..(11): 2'-deoxy-2'Fluoro
  misc_feature (18)..(18): 2'-deoxy-2'Fluoro
  misc_feature (1)..(19): ribonucleotide unmodified or modified as described for this sequence
gacgugcucauggagggcgtt

SEQ ID NO: 1268 - DNA, 21 bp, Artificial Sequence
  Description of Artificial Sequence: Target Sequence/siNA antisense region (stab08)
  misc_feature (1)..(1): 2'-deoxy-2'Fluoro
  misc_feature (2)..(2): 2'-O-methyl
  misc_feature (3)..(8): 2'-deoxy-2'Fluoro
  misc_feature (9)..(9): 2'-O-methyl
  misc_feature (10)..(10): 2'-deoxy-2'Fluoro
  misc_feature (11)..(13): 2'-O-methyl
  misc_feature (14)..(14): 2'-deoxy-2'Fluoro
  misc_feature (15)..(15): 2'-O-methyl
  misc_feature (16)..(16): 2'-deoxy-2'Fluoro
  misc_feature (17)..(17): 2'-O-methyl
  misc_feature (18)..(19): 2'-deoxy-2'Fluoro
  misc_feature (20)..(20): Phosphorothioate or Phosphorodithioate 3'-Internucleotide Linkage (optionally present)
  misc_feature (1)..(19): ribonucleotide unmodified or modified as described for this sequence
cgcccuccaugagcacguctt

SEQ ID NO: 1269 - DNA, 21 bp, Artificial Sequence
  Description of Artificial Sequence: Target Sequence/siNA sense region (stab09)
  misc_feature (1)..(1): 5'-3 attached terminal deoxyabasic moiety, inverted abasic, inverted nucleotide or other terminal cap that is optionally present
  misc_feature (21)..(21): 3'-3 attached terminal deoxyabasic moiety, inverted abasic, inverted nucleotide or other terminal cap that is optionally present
  misc_feature (1)..(19): ribonucleotide unmodified or modified as described for this sequence
gacgugcucauggagggcgtt

SEQ ID NO: 1270 - DNA, 21 bp, Artificial Sequence
  Description of Artificial Sequence: Target Sequence/siNA antisense region (stab10)
  misc_feature (20)..(20): Phosphorothioate or Phosphorodithioate 3'-Internucleotide Linkage (optionally present)
  misc_feature (1)..(19): ribonucleotide unmodified or modified as described for this sequence
cgcccuccaugagcacguctt

SEQ ID NO: 1271 - DNA, 21 bp, Artificial Sequence
  Description of Artificial Sequence: Target Sequence/siNA antisense region (stab19)
  misc_feature (21)..(21): 3'-3 attached terminal deoxyabasic moiety, inverted abasic, inverted nucleotide or other terminal cap that is optionally present
  misc_feature (1)..(1): 2'-deoxy-2'Fluoro
  misc_feature (2)..(2): 2'-O-methyl
  misc_feature (3)..(8): 2'-deoxy-2'Fluoro
  misc_feature (9)..(9): 2'-O-methyl
  misc_feature (10)..(10): 2'-deoxy-2'Fluoro
  misc_feature (11)..(13): 2'-O-methyl
  misc_feature (14)..(14): 2'-deoxy-2'Fluoro
  misc_feature (15)..(15): 2'-O-methyl
  misc_feature (16)..(16): 2'-deoxy-2'Fluoro
  misc_feature (17)..(17): 2'-O-methyl
  misc_feature (18)..(19): 2'-deoxy-2'Fluoro
  misc_feature (1)..(19): ribonucleotide unmodified or modified as described for this sequence
cgcccuccaugagcacguctt

SEQ ID NO: 1272 - DNA, 21 bp, Artificial Sequence
  Description of Artificial Sequence: Target Sequence/siNA antisense region (stab22)
  misc_feature (21)..(21): 3'-3 attached terminal deoxyabasic moiety, inverted abasic, inverted nucleotide or other terminal cap that is optionally present
  misc_feature (20)..(20): Phosphorothioate or Phosphorodithioate 3'-Internucleotide Linkage (optionally present)
  misc_feature (1)..(19): ribonucleotide unmodified or modified as described for this sequence
cgcccuccaugagcacguctt

SEQ ID NO: 1273 - DNA, 21 bp, Artificial Sequence
  Description of Artificial Sequence: Target Sequence/siNA antisense region (stab25)
  misc_feature (4)..(8): 2'-deoxy-2'Fluoro
  misc_feature (9)..(9): 2'-O-methyl
  misc_feature (10)..(10): 2'-deoxy-2'Fluoro
  misc_feature (11)..(13): 2'-O-methyl
  misc_feature (14)..(14): 2'-deoxy-2'Fluoro
  misc_feature (15)..(15): 2'-O-methyl
  misc_feature (16)..(16): 2'-deoxy-2'Fluoro
  misc_feature (17)..(17): 2'-O-methyl
  misc_feature (18)..(19): 2'-deoxy-2'Fluoro
  misc_feature (20)..(20): Phosphorothioate or Phosphorodithioate 3'-Internucleotide Linkage (optionally present)
  misc_feature (1). .(19): ribonucleotide unmodified or modified as described for this sequence
cgcccuccaugagcacguctt

SEQ ID NO: 1274 - RNA, 21 nt, Artificial Sequence
  Description of Artificial Sequence: Target Sequence/siNA antisense region (stab35)
  misc_feature (4)..(8): 2'-deoxy-2'Fluoro
  misc_feature (9)..(9): 2'-O-methyl
  misc_feature (10)..(10): 2'-deoxy-2'Fluoro
  misc_feature (11)..(13): 2'-O-methyl
  misc_feature (14)..(14): 2'-deoxy-2'Fluoro
  misc_feature (15)..(15): 2'-O-methyl
  misc_feature (16)..(16): 2'-deoxy-2'Fluoro
  misc_feature (17)..(17): 2'-O-methyl
  misc_feature (18)..(19): 2'-deoxy-2'Fluoro
  misc_feature (20)..(21): 2'-O-methyl
cgcccuccaugagcacgucuu

SEQ ID NO: 1275 - RNA, 21 nt, Artificial Sequence
  Description of Artificial Sequence: Target Sequence/siNA antisense region (stab36)
  misc_feature (4)..(8): 2'-deoxy-2'Fluoro
  misc_feature (9)..(9): 2'-O-methyl
  misc_feature (10)..(10): 2'-deoxy-2'Fluoro
  misc_feature (11)..(13): 2'-O-methyl
  misc_feature (14)..(14): 2'-deoxy-2'Fluoro
  misc_feature (15)..(15): 2'-O-methyl
  misc_feature (16)..(16): 2'-deoxy-2'Fluoro
  misc_feature (17)..(17): 2'-O-methyl
  misc_feature (18)..(19): 2'-deoxy-2'Fluoro
  misc_feature (20)..(21): 2'-O-methyl
cgcccuccaugagcacgucug

SEQ ID NO: 1276 - RNA, 19 nt, Artificial Sequence
  Description of Artificial Sequence: Target Sequence/siNA sense region
gugaagacugagguggagg

SEQ ID NO: 1277 - RNA, 19 nt, Artificial Sequence
  Description of Artificial Sequence: Target Sequence/siNA antisense region
ccuccaccucagucuucac

SEQ ID NO: 1278 - DNA, 21 bp, Artificial Sequence
  Description of Artificial Sequence: Target Sequence/siNA sense region (stab00)
  misc_feature (1)..(19): ribonucleotide unmodified or modified as described for this sequence
gugaagacugagguggaggtt

SEQ ID NO: 1279 - DNA, 21 bp, Artificial Sequence
  Description of Artificial Sequence: Target Sequence/siNA antisense region (stab00as)
  misc_feature (1)..(19): ribonucleotide unmodified or modified as described for this sequence
ccuccaccucagucuucactt

SEQ ID NO: 1280 - DNA, 21 bp, Artificial Sequence
  Description of Artificial Sequence: Target Sequence/siNA sense region (stab04)
  misc_feature (1)..(1): 5'-3 attached terminal deoxyabasic moiety, inverted abasic, inverted nucleotide or other terminal cap that is optionally present
  misc_feature (21)..(21): 3'-3 attached terminal deoxyabasic moiety, inverted abasic, inverted nucleotide or other terminal cap that is optionally present
  misc_feature (2)..(2): 2'-deoxy-2'Fluoro
  misc_feature (8)..(9): 2'-deoxy-2'Fluoro
  misc_feature (14)..(14): 2'-deoxy-2'Fluoro
  misc_feature (1). .(19): ribonucleotide unmodified or modified as described for this sequence
gugaagacugagguggaggtt

SEQ ID NO: 1281 - DNA, 21 bp, Artificial Sequence
  Description of Artificial Sequence: Target Sequence/siNA antisense region (stab05)
  misc_feature (1)..(5): 2'-deoxy-2'Fluoro
  misc_feature (7)..(10): 2'-deoxy-2'Fluoro
  misc_feature (13)..(17): 2'-deoxy-2'Fluoro
  misc_feature (19)..(19): 2'-deoxy-2'Fluoro
  misc_feature (20)..(20): Phosphorothioate or Phosphorodithioate 3'-Internucleotide Linkage (optionally present)
  misc_feature (1). .(19): ribonucleotide unmodified or modified as described for this sequence
ccuccaccucagucuucactt

SEQ ID NO: 1282 - DNA, 21 bp, Artificial Sequence
  Description of Artificial Sequence: Target Sequence/siNA sense region (stab07)
  misc_feature (1)..(1): 5'-3 attached terminal deoxyabasic moiety, inverted abasic, inverted nucleotide or other terminal cap that is optionally present
  misc_feature (21)..(21): 3'-3 attached terminal deoxyabasic moiety, inverted abasic, inverted nucleotide or other terminal cap that is optionally present
  misc_feature (2)..(2): 2'-deoxy-2'Fluoro
  misc_feature (8)..(9): 2'-deoxy-2'Fluoro
  misc_feature (14)..(14): 2'-deoxy-2'Fluoro
  misc_feature (1)..(19): ribonucleotide unmodified or modified as described for this sequence
gugaagacugagguggaggtt

SEQ ID NO: 1283 - DNA, 21 bp, Artificial Sequence
  Description of Artificial Sequence: Target Sequence/siNA antisense region (stab08)
  misc_feature (1)..(5): 2'-deoxy-2'Fluoro
  misc_feature (6)..(6): 2'-O-methyl
  misc_feature (7)..(10): 2'-deoxy-2'Fluoro
  misc_feature (11)..(12): 2'-O-methyl
  misc_feature (13)..(17): 2'-deoxy-2'Fluoro
  misc_feature (18)..(18): 2'-O-methyl
  misc_feature (19)..(19): 2'-deoxy-2'Fluoro
  misc_feature (20)..(20): Phosphorothioate or Phosphorodithioate 3'-Internucleotide Linkage (optionally present)
  misc_feature (1)..(19): ribonucleotide unmodified or modified as described for this sequence
ccuccaccucagucuucactt

SEQ ID NO: 1284 - DNA, 21 bp, Artificial Sequence
  Description of Artificial Sequence: Target Sequence/siNA sense region (stab09)
  misc_feature (1)..(1): 5'-3 attached terminal deoxyabasic moiety, inverted abasic, inverted nucleotide or other terminal cap that is optionally present
  misc_feature (21)..(21): 3'-3 attached terminal deoxyabasic moiety, inverted abasic, inverted nucleotide or other terminal cap that is optionally present
  misc_feature (1)..(19): ribonucleotide unmodified or modified as described for this sequence
gugaagacugagguggaggtt

SEQ ID NO: 1285 - DNA, 21 bp, Artificial Sequence
  Description of Artificial Sequence: Target Sequence/siNA antisense region (stab10)
  misc_feature (20)..(20): Phosphorothioate or Phosphorodithioate 3'-Internucleotide Linkage (optionally present)
  misc_feature (1)..(19): ribonucleotide unmodified or modified as described for this sequence
ccuccaccucagucuucactt

SEQ ID NO: 1286 - DNA, 21 bp, Artificial Sequence
  Description of Artificial Sequence: Target Sequence/siNA antisense region (stab19)
  misc_feature (21)..(21): 3'-3 attached terminal deoxyabasic moiety, inverted abasic, inverted nucleotide or other terminal cap that is optionally present
  misc_feature (1)..(5): 2'-deoxy-2'Fluoro
  misc_feature (6)..(6): 2'-O-methyl
  misc_feature (7)..(10): 2'-deoxy-2'Fluoro
  misc_feature (11)..(12): 2'-O-methyl
  misc_feature (13)..(17): 2'-deoxy-2'Fluoro
  misc_feature (18)..(18): 2'-O-methyl
  misc_feature (19)..(19): 2'-deoxy-2'Fluoro
  misc_feature (1)..(19): ribonucleotide unmodified or modified as described for this sequence
ccuccaccucagucuucactt

SEQ ID NO: 1287 - DNA, 21 bp, Artificial Sequence
  Description of Artificial Sequence: Target Sequence/siNA antisense region (stab22)
  misc_feature (21)..(21): 3'-3 attached terminal deoxyabasic moiety, inverted abasic, inverted nucleotide or other terminal cap that is optionally present
  misc_feature (20)..(20): Phosphorothioate or Phosphorodithioate 3'-Internucleotide Linkage (optionally present)
  misc_feature (1)..(19): ribonucleotide unmodified or modified as described for this sequence
ccuccaccucagucuucactt

SEQ ID NO: 1288 - DNA, 21 bp, Artificial Sequence
  Description of Artificial Sequence: Target Sequence/siNA antisense region (stab25)
  misc_feature (4)..(5): 2'-deoxy-2'Fluoro
  misc_feature (6)..(6): 2'-O-methyl
  misc_feature (7)..(10): 2'-deoxy-2'Fluoro
  misc_feature (11)..(12): 2'-O-methyl
  misc_feature (13)..(17): 2'-deoxy-2'Fluoro
  misc_feature (18)..(18): 2'-O-methyl
  misc_feature (19)..(19): 2'-deoxy-2'Fluoro
  misc_feature (20)..(20): Phosphorothioate or Phosphorodithioate 3'-Internucleotide Linkage (optionally present)
  misc_feature (1). .(19): ribonucleotide unmodified or modified as described for this sequence
ccuccaccucagucuucactt

SEQ ID NO: 1289 - RNA, 21 nt, Artificial Sequence
  Description of Artificial Sequence: Target Sequence/siNA antisense region (stab35)
  misc_feature (4)..(5): 2'-deoxy-2'Fluoro
  misc_feature (6)..(6): 2'-O-methyl
  misc_feature (7)..(10): 2'-deoxy-2'Fluoro
  misc_feature (11)..(12): 2'-O-methyl
  misc_feature (13)..(17): 2'-deoxy-2'Fluoro
  misc_feature (18)..(18): 2'-O-methyl
  misc_feature (19)..(19): 2'-deoxy-2'Fluoro
  misc_feature (20)..(21): 2'-O-methyl
ccuccaccucagucuucacuu

SEQ ID NO: 1290 - RNA, 21 nt, Artificial Sequence
  Description of Artificial Sequence: Target Sequence/siNA antisense region (stab36)
  misc_feature (4)..(5): 2'-deoxy-2'Fluoro
  misc_feature (6)..(6): 2'-O-methyl
  misc_feature (7)..(10): 2'-deoxy-2'Fluoro
  misc_feature (11)..(12): 2'-O-methyl
  misc_feature (13)..(17): 2'-deoxy-2'Fluoro
  misc_feature (18)..(18): 2'-O-methyl
  misc_feature (19)..(19): 2'-deoxy-2'Fluoro
  misc_feature (20)..(21): 2'-O-methyl
ccuccaccucagucuucacgc

SEQ ID NO: 1291 - RNA, 19 nt, Artificial Sequence
  Description of Artificial Sequence: Target Sequence/siNA sense region
gacacacugaccccacccc

SEQ ID NO: 1292 - RNA, 19 nt, Artificial Sequence
  Description of Artificial Sequence: Target Sequence/siNA antisense region
gggguggggucaguguguc

SEQ ID NO: 1293 - DNA, 21 bp, Artificial Sequence
  Description of Artificial Sequence: Target Sequence/siNA sense region (stab00)
  misc_feature (1)..(19): ribonucleotide unmodified or modified as described for this sequence
gacacacugaccccacccctt

SEQ ID NO: 1294 - DNA, 21 bp, Artificial Sequence
  Description of Artificial Sequence: Target Sequence/siNA antisense region (stab00as)
  misc_feature (1)..(19): ribonucleotide unmodified or modified as described for this sequence
gggguggggucaguguguctt

SEQ ID NO: 1295 - DNA, 21 bp, Artificial Sequence
  Description of Artificial Sequence: Target Sequence/siNA sense region (stab04)
  misc_feature (1)..(1): 5'-3 attached terminal deoxyabasic moiety, inverted abasic, inverted nucleotide or other terminal cap that is optionally present
  misc_feature (21)..(21): 3'-3 attached terminal deoxyabasic moiety, inverted abasic, inverted nucleotide or other terminal cap that is optionally present
  misc_feature (3)..(3): 2'-deoxy-2'Fluoro
  misc_feature (5)..(5): 2'-deoxy-2'Fluoro
  misc_feature (7)..(8): 2'-deoxy-2'Fluoro
  misc_feature (11)..(14): 2'-deoxy-2'Fluoro
  misc_feature (16)..(19): 2'-deoxy-2'Fluoro
  misc_feature (1). .(19): ribonucleotide unmodified or modified as described for this sequence
gacacacugaccccacccctt

SEQ ID NO: 1296 - DNA, 21 bp, Artificial Sequence
  Description of Artificial Sequence: Target Sequence/siNA antisense region (stab05)
  misc_feature (5)..(5): 2'-deoxy-2'Fluoro
  misc_feature (10)..(11): 2'-deoxy-2'Fluoro
  misc_feature (14)..(14): 2'-deoxy-2'Fluoro
  misc_feature (16)..(16): 2'-deoxy-2'Fluoro
  misc_feature (18)..(19): 2'-deoxy-2'Fluoro
  misc_feature (20)..(20): Phosphorothioate or Phosphorodithioate 3'-Internucleotide Linkage (optionally present)
  misc_feature (1). .(19): ribonucleotide unmodified or modified as described for this sequence
gggguggggucaguguguctt

SEQ ID NO: 1297 - DNA, 21 bp, Artificial Sequence
  Description of Artificial Sequence: Target Sequence/siNA sense region (stab07)
  misc_feature (1)..(1): 5'-3 attached terminal deoxyabasic moiety, inverted abasic, inverted nucleotide or other terminal cap that is optionally present
  misc_feature (21)..(21): 3'-3 attached terminal deoxyabasic moiety, inverted abasic, inverted nucleotide or other terminal cap that is optionally present
  misc_feature (3)..(3): 2'-deoxy-2'Fluoro
  misc_feature (5)..(5): 2'-deoxy-2'Fluoro
  misc_feature (7)..(8): 2'-deoxy-2'Fluoro
  misc_feature (11)..(14): 2'-deoxy-2'Fluoro
  misc_feature (16)..(19): 2'-deoxy-2'Fluoro
  misc_feature (1)..(19): ribonucleotide unmodified or modified as described for this sequence
gacacacugaccccacccctt

SEQ ID NO: 1298 - DNA, 21 bp, Artificial Sequence
  Description of Artificial Sequence: Target Sequence/siNA antisense region (stab08)
  misc_feature (1)..(4): 2'-O-methyl
  misc_feature (5)..(5): 2'-deoxy-2'Fluoro
  misc_feature (6)..(9): 2'-O-methyl
  misc_feature (10)..(11): 2'-deoxy-2'Fluoro
  misc_feature (12)..(13): 2'-O-methyl
  misc_feature (14)..(14): 2'-deoxy-2'Fluoro
  misc_feature (15)..(15): 2'-O-methyl
  misc_feature (16)..(16): 2'-deoxy-2'Fluoro
  misc_feature (17)..(17): 2'-O-methyl
  misc_feature (18)..(19): 2'-deoxy-2'Fluoro
  misc_feature (20)..(20): Phosphorothioate or Phosphorodithioate 3'-Internucleotide Linkage (optionally present)
  misc_feature (1)..(19): ribonucleotide unmodified or modified as described for this sequence
gggguggggucaguguguctt

SEQ ID NO: 1299 - DNA, 21 bp, Artificial Sequence
  Description of Artificial Sequence: Target Sequence/siNA sense region (stab09)
  misc_feature (1)..(1): 5'-3 attached terminal deoxyabasic moiety, inverted abasic, inverted nucleotide or other terminal cap that is optionally present
  misc_feature (21)..(21): 3'-3 attached terminal deoxyabasic moiety, inverted abasic, inverted nucleotide or other terminal cap that is optionally present
  misc_feature (1)..(19): ribonucleotide unmodified or modified as described for this sequence
gacacacugaccccacccctt

SEQ ID NO: 1300 - DNA, 21 bp, Artificial Sequence
  Description of Artificial Sequence: Target Sequence/siNA antisense region (stab10)
  misc_feature (20)..(20): Phosphorothioate or Phosphorodithioate 3'-Internucleotide Linkage (optionally present)
  misc_feature (1)..(19): ribonucleotide unmodified or modified as described for this sequence
gggguggggucaguguguctt

SEQ ID NO: 1301 - DNA, 21 bp, Artificial Sequence
  Description of Artificial Sequence: Target Sequence/siNA antisense region (stab19)
  misc_feature (21)..(21): 3'-3 attached terminal deoxyabasic moiety, inverted abasic, inverted nucleotide or other terminal cap that is optionally present
  misc_feature (1)..(4): 2'-O-methyl
  misc_feature (5)..(5): 2'-deoxy-2'Fluoro
  misc_feature (6)..(9): 2'-O-methyl
  misc_feature (10)..(11): 2'-deoxy-2'Fluoro
  misc_feature (12)..(13): 2'-O-methyl
  misc_feature (14)..(14): 2'-deoxy-2'Fluoro
  misc_feature (15)..(15): 2'-O-methyl
  misc_feature (16)..(16): 2'-deoxy-2'Fluoro
  misc_feature (17)..(17): 2'-O-methyl
  misc_feature (18)..(19): 2'-deoxy-2'Fluoro
  misc_feature (1)..(19): ribonucleotide unmodified or modified as described for this sequence
gggguggggucaguguguctt

SEQ ID NO: 1302 - DNA, 21 bp, Artificial Sequence
  Description of Artificial Sequence: Target Sequence/siNA antisense region (stab22)
  misc_feature (21)..(21): 3'-3 attached terminal deoxyabasic moiety, inverted abasic, inverted nucleotide or other terminal cap that is optionally present
  misc_feature (20)..(20): Phosphorothioate or Phosphorodithioate 3'-Internucleotide Linkage (optionally present)
  misc_feature (1)..(19): ribonucleotide unmodified or modified as described for this sequence
gggguggggucaguguguctt

SEQ ID NO: 1303 - DNA, 21 bp, Artificial Sequence
  Description of Artificial Sequence: Target Sequence/siNA antisense region (stab25)
  misc_feature (4)..(4): 2'-O-methyl
  misc_feature (5)..(5): 2'-deoxy-2'Fluoro
  misc_feature (6)..(9): 2'-O-methyl
  misc_feature (10)..(11): 2'-deoxy-2'Fluoro
  misc_feature (12)..(13): 2'-O-methyl
  misc_feature (14)..(14): 2'-deoxy-2'Fluoro
  misc_feature (15)..(15): 2'-O-methyl
  misc_feature (16)..(16): 2'-deoxy-2'Fluoro
  misc_feature (17)..(17): 2'-O-methyl
  misc_feature (18)..(19): 2'-deoxy-2'Fluoro
  misc_feature (20)..(20): Phosphorothioate or Phosphorodithioate 3'-Internucleotide Linkage (optionally present)
  misc_feature (1)..(19): ribonucleotide unmodified or modified as described for this sequence
gggguggggucaguguguctt

SEQ ID NO: 1304 - RNA, 21 nt, Artificial Sequence
  Description of Artificial Sequence: Target Sequence/siNA antisense region (stab35)
  misc_feature (4)..(4): 2'-O-methyl
  misc_feature (5)..(5): 2'-deoxy-2'Fluoro
  misc_feature (6)..(9): 2'-O-methyl
  misc_feature (10)..(11): 2'-deoxy-2'Fluoro
  misc_feature (12)..(13): 2'-O-methyl
  misc_feature (14)..(14): 2'-deoxy-2'Fluoro
  misc_feature (15)..(15): 2'-O-methyl
  misc_feature (16)..(16): 2'-deoxy-2'Fluoro
  misc_feature (17)..(17): 2'-O-methyl
  misc_feature (18)..(19): 2'-deoxy-2'Fluoro
  misc_feature (20)..(21): 2'-O-methyl
gggguggggucagugugucuu

SEQ ID NO: 1305 - RNA, 21 nt, Artificial Sequence
  Description of Artificial Sequence: Target Sequence/siNA antisense region (stab36)
  misc_feature (4)..(4): 2'-O-methyl
  misc_feature (5)..(5): 2'-deoxy-2'Fluoro
  misc_feature (6)..(9): 2'-O-methyl
  misc_feature (10)..(11): 2'-deoxy-2'Fluoro
  misc_feature (12)..(13): 2'-O-methyl
  misc_feature (14)..(14): 2'-deoxy-2'Fluoro
  misc_feature (15)..(15): 2'-O-methyl
  misc_feature (16)..(16): 2'-deoxy-2'Fluoro
  misc_feature (17)..(17): 2'-O-methyl
  misc_feature (18)..(19): 2'-deoxy-2'Fluoro
  misc_feature (20)..(21): 2'-O-methyl
gggguggggucaguguguccu

SEQ ID NO: 1306 - RNA, 19 nt, Artificial Sequence
  Description of Artificial Sequence: Target Sequence/siNA sense region
cccucggaugcuggcucac

SEQ ID NO: 1307 - RNA, 19 nt, Artificial Sequence
  Description of Artificial Sequence: Target Sequence/siNA antisense region
gugagccagcauccgaggg

SEQ ID NO: 1308 - DNA, 21 bp, Artificial Sequence
  Description of Artificial Sequence: Target Sequence/siNA sense region (stab00)
  misc_feature (1)..(19): ribonucleotide unmodified or modified as described for this sequence
cccucggaugcuggcucactt

SEQ ID NO: 1309 - DNA, 21 bp, Artificial Sequence
  Description of Artificial Sequence: Target Sequence/siNA antisense region (stab00as)
  misc_feature (1)..(19): ribonucleotide unmodified or modified as described for this sequence
gugagccagcauccgagggtt

SEQ ID NO: 1310 - DNA, 21 bp, Artificial Sequence
  Description of Artificial Sequence: Target Sequence/siNA sense region (stab04)
  misc_feature (1)..(1): 5'-3 attached terminal deoxyabasic moiety, inverted abasic, inverted nucleotide or other terminal cap that is optionally present
  misc_feature (21)..(21): 3'-3 attached terminal deoxyabasic moiety, inverted abasic, inverted nucleotide or other terminal cap that is optionally present
  misc_feature (1)..(5): 2'-deoxy-2'Fluoro
  misc_feature (9)..(9): 2'-deoxy-2'Fluoro
  misc_feature (11)..(12): 2'-deoxy-2'Fluoro
  misc_feature (15)..(17): 2'-deoxy-2'Fluoro
  misc_feature (19)..(19): 2'-deoxy-2'Fluoro
  misc_feature (1). .(19): ribonucleotide unmodified or modified as described for this sequence
cccucggaugcuggcucactt

SEQ ID NO: 1311 - DNA, 21 bp, Artificial Sequence
  Description of Artificial Sequence: Target Sequence/siNA antisense region (stab05)
  misc_feature (2)..(2): 2'-deoxy-2'Fluoro
  misc_feature (6)..(7): 2'-deoxy-2'Fluoro
  misc_feature (10)..(10): 2'-deoxy-2'Fluoro
  misc_feature (12)..(14): 2'-deoxy-2'Fluoro
  misc_feature (20)..(20): Phosphorothioate or Phosphorodithioate 3'-Internucleotide Linkage (optionally present)
  misc_feature (1). .(19): ribonucleotide unmodified or modified as described for this sequence
gugagccagcauccgagggtt

SEQ ID NO: 1312 - DNA, 21 bp, Artificial Sequence
  Description of Artificial Sequence: Target Sequence/siNA sense region (stab07)
  misc_feature (1)..(1): 5'-3 attached terminal deoxyabasic moiety, inverted abasic, inverted nucleotide or other terminal cap that is optionally present
  misc_feature (21)..(21): 3'-3 attached terminal deoxyabasic moiety, inverted abasic, inverted nucleotide or other terminal cap that is optionally present
  misc_feature (1)..(5): 2'-deoxy-2'Fluoro
  misc_feature (9)..(9): 2'-deoxy-2'Fluoro
  misc_feature (11)..(12): 2'-deoxy-2'Fluoro
  misc_feature (15)..(17): 2'-deoxy-2'Fluoro
  misc_feature (19)..(19): 2'-deoxy-2'Fluoro
  misc_feature (1)..(19): ribonucleotide unmodified or modified as described for this sequence
cccucggaugcuggcucactt

SEQ ID NO: 1313 - DNA, 21 bp, Artificial Sequence
  Description of Artificial Sequence: Target Sequence/siNA antisense region (stab08)
  misc_feature (1)..(1): 2'-O-methyl
  misc_feature (2)..(2): 2'-deoxy-2'Fluoro
  misc_feature (3)..(5): 2'-O-methyl
  misc_feature (6)..(7): 2'-deoxy-2'Fluoro
  misc_feature (8)..(9): 2'-O-methyl
  misc_feature (10)..(10): 2'-deoxy-2'Fluoro
  misc_feature (11)..(11): 2'-O-methyl
  misc_feature (12)..(14): 2'-deoxy-2'Fluoro
  misc_feature (15)..(19): 2'-O-methyl
  misc_feature (20)..(20): Phosphorothioate or Phosphorodithioate 3'-Internucleotide Linkage (optionally present)
  misc_feature (1)..(19): ribonucleotide unmodified or modified as described for this sequence
gugagccagcauccgagggtt

SEQ ID NO: 1314 - DNA, 21 bp, Artificial Sequence
  Description of Artificial Sequence: Target Sequence/siNA sense region (stab09)
  misc_feature (1)..(1): 5'-3 attached terminal deoxyabasic moiety, inverted abasic, inverted nucleotide or other terminal cap that is optionally present
  misc_feature (21)..(21): 3'-3 attached terminal deoxyabasic moiety, inverted abasic, inverted nucleotide or other terminal cap that is optionally present
  misc_feature (1)..(19): ribonucleotide unmodified or modified as described for this sequence
cccucggaugcuggcucactt

SEQ ID NO: 1315 - DNA, 21 bp, Artificial Sequence
  Description of Artificial Sequence: Target Sequence/siNA antisense region (stab10)
  misc_feature (20)..(20): Phosphorothioate or Phosphorodithioate 3'-Internucleotide Linkage (optionally present)
  misc_feature (1)..(19): ribonucleotide unmodified or modified as described for this sequence
gugagccagcauccgagggtt

SEQ ID NO: 1316 - DNA, 21 bp, Artificial Sequence
  Description of Artificial Sequence: Target Sequence/siNA antisense region (stab19)
  misc_feature (21)..(21): 3'-3 attached terminal deoxyabasic moiety, inverted abasic, inverted nucleotide or other terminal cap that is optionally present
  misc_feature (1)..(1): 2'-O-methyl
  misc_feature (2)..(2): 2'-deoxy-2'Fluoro
  misc_feature (3)..(5): 2'-O-methyl
  misc_feature (6)..(7): 2'-deoxy-2'Fluoro
  misc_feature (8)..(9): 2'-O-methyl
  misc_feature (10)..(10): 2'-deoxy-2'Fluoro
  misc_feature (11)..(11): 2'-O-methyl
  misc_feature (12)..(14): 2'-deoxy-2'Fluoro
  misc_feature (15)..(19): 2'-O-methyl
  misc_feature (1)..(19): ribonucleotide unmodified or modified as described for this sequence
gugagccagcauccgagggtt

SEQ ID NO: 1317 - DNA, 21 bp, Artificial Sequence
  Description of Artificial Sequence: Target Sequence/siNA antisense region (stab22)
  misc_feature (21)..(21): 3'-3 attached terminal deoxyabasic moiety, inverted abasic, inverted nucleotide or other terminal cap that is optionally present
  misc_feature (20)..(20): Phosphorothioate or Phosphorodithioate 3'-Internucleotide Linkage (optionally present)
  misc_feature (1)..(19): ribonucleotide unmodified or modified as described for this sequence
gugagccagcauccgagggtt

SEQ ID NO: 1318 - DNA, 21 bp, Artificial Sequence
  Description of Artificial Sequence: Target Sequence/siNA antisense region (stab25)
  misc_feature (4)..(5): 2'-O-methyl
  misc_feature (6)..(7): 2'-deoxy-2'Fluoro
  misc_feature (8)..(9): 2'-O-methyl
  misc_feature (10)..(10): 2'-deoxy-2'Fluoro
  misc_feature (11)..(11): 2'-O-methyl
  misc_feature (12)..(14): 2'-deoxy-2'Fluoro
  misc_feature (15)..(19): 2'-O-methyl
  misc_feature (20)..(20): Phosphorothioate or Phosphorodithioate 3'-Internucleotide Linkage (optionally present)
  misc_feature (1). .(19): ribonucleotide unmodified or modified as described for this sequence
gugagccagcauccgagggtt

SEQ ID NO: 1319 - RNA, 21 nt, Artificial Sequence
  Description of Artificial Sequence: Target Sequence/siNA antisense region (stab35)
  misc_feature (4)..(5): 2'-O-methyl
  misc_feature (6)..(7): 2'-deoxy-2'Fluoro
  misc_feature (8)..(9): 2'-O-methyl
  misc_feature (10)..(10): 2'-deoxy-2'Fluoro
  misc_feature (11)..(11): 2'-O-methyl
  misc_feature (12)..(14): 2'-deoxy-2'Fluoro
  misc_feature (15)..(21): 2'-O-methyl
gugagccagcauccgaggguu

SEQ ID NO: 1320 - RNA, 21 nt, Artificial Sequence
  Description of Artificial Sequence: Target Sequence/siNA antisense region (stab36)
  misc_feature (4)..(5): 2'-O-methyl
  misc_feature (6)..(7): 2'-deoxy-2'Fluoro
  misc_feature (8)..(9): 2'-O-methyl
  misc_feature (10)..(10): 2'-deoxy-2'Fluoro
  misc_feature (11)..(11): 2'-O-methyl
  misc_feature (12)..(14): 2'-deoxy-2'Fluoro
  misc_feature (15)..(21): 2'-O-methyl
gugagccagcauccgaggggg

SEQ ID NO: 1321 - RNA, 19 nt, Artificial Sequence
  Description of Artificial Sequence: Target Sequence/siNA sense region
ccuuuccagagcagccccu

SEQ ID NO: 1322 - RNA, 19 nt, Artificial Sequence
  Description of Artificial Sequence: Target Sequence/siNA antisense region
aggggcugcucuggaaagg

SEQ ID NO: 1323 - DNA, 21 bp, Artificial Sequence
  Description of Artificial Sequence: Target Sequence/siNA sense region (stab00)
  misc_feature (1)..(19): ribonucleotide unmodified or modified as described for this sequence
ccuuuccagagcagccccutt

SEQ ID NO: 1324 - DNA, 21 bp, Artificial Sequence
  Description of Artificial Sequence: Target Sequence/siNA antisense region (stab00as)
  misc_feature (1)..(19): ribonucleotide unmodified or modified as described for this sequence
aggggcugcucuggaaaggtt

SEQ ID NO: 1325 - DNA, 21 bp, Artificial Sequence
  Description of Artificial Sequence: Target Sequence/siNA sense region (stab04)
  misc_feature (1)..(1): 5'-3 attached terminal deoxyabasic moiety, inverted abasic, inverted nucleotide or other terminal cap that is optionally present
  misc_feature (21)..(21): 3'-3 attached terminal deoxyabasic moiety, inverted abasic, inverted nucleotide or other terminal cap that is optionally present
  misc_feature (1)..(7): 2'-deoxy-2'Fluoro
  misc_feature (12)..(12): 2'-deoxy-2'Fluoro
  misc_feature (15)..(19): 2'-deoxy-2'Fluoro
  misc_feature (1). .(19): ribonucleotide unmodified or modified as described for this sequence
ccuuuccagagcagccccutt

SEQ ID NO: 1326 - DNA, 21 bp, Artificial Sequence
  Description of Artificial Sequence: Target Sequence/siNA antisense region (stab05)
  misc_feature (6)..(7): 2'-deoxy-2'Fluoro
  misc_feature (9)..(12): 2'-deoxy-2'Fluoro
  misc_feature (20)..(20): Phosphorothioate or Phosphorodithioate 3'-Internucleotide Linkage (optionally present)
  misc_feature (1). .(19): ribonucleotide unmodified or modified as described for this sequence
aggggcugcucuggaaaggtt

SEQ ID NO: 1327 - DNA, 21 bp, Artificial Sequence
  Description of Artificial Sequence: Target Sequence/siNA sense region (stab07)
  misc_feature (1)..(1): 5'-3 attached terminal deoxyabasic moiety, inverted abasic, inverted nucleotide or other terminal cap that is optionally present
  misc_feature (21)..(21): 3'-3 attached terminal deoxyabasic moiety, inverted abasic, inverted nucleotide or other terminal cap that is optionally present
  misc_feature (1)..(7): 2'-deoxy-2'Fluoro
  misc_feature (12)..(12): 2'-deoxy-2'Fluoro
  misc_feature (15)..(19): 2'-deoxy-2'Fluoro
  misc_feature (1)..(19): ribonucleotide unmodified or modified as described for this sequence
ccuuuccagagcagccccutt

SEQ ID NO: 1328 - DNA, 21 bp, Artificial Sequence
  Description of Artificial Sequence: Target Sequence/siNA antisense region (stab08)
  misc_feature (1)..(5): 2'-O-methyl
  misc_feature (6)..(7): 2'-deoxy-2'Fluoro
  misc_feature (8)..(8): 2'-O-methyl
  misc_feature (9)..(12): 2'-deoxy-2'Fluoro
  misc_feature (13)..(19): 2'-O-methyl
  misc_feature (20)..(20): Phosphorothioate or Phosphorodithioate 3'-Internucleotide Linkage (optionally present)
  misc_feature (1)..(19): ribonucleotide unmodified or modified as described for this sequence
aggggcugcucuggaaaggtt

SEQ ID NO: 1329 - DNA, 21 bp, Artificial Sequence
  Description of Artificial Sequence: Target Sequence/siNA sense region (stab09)
  misc_feature (1)..(1): 5'-3 attached terminal deoxyabasic moiety, inverted abasic, inverted nucleotide or other terminal cap that is optionally present
  misc_feature (21)..(21): 3'-3 attached terminal deoxyabasic moiety, inverted abasic, inverted nucleotide or other terminal cap that is optionally present
  misc_feature (1)..(19): ribonucleotide unmodified or modified as described for this sequence
ccuuuccagagcagccccutt

SEQ ID NO: 1330 - DNA, 21 bp, Artificial Sequence
  Description of Artificial Sequence: Target Sequence/siNA antisense region (stab10)
  misc_feature (20)..(20): Phosphorothioate or Phosphorodithioate 3'-Internucleotide Linkage (optionally present)
  misc_feature (1)..(19): ribonucleotide unmodified or modified as described for this sequence
aggggcugcucuggaaaggtt

SEQ ID NO: 1331 - DNA, 21 bp, Artificial Sequence
  Description of Artificial Sequence: Target Sequence/siNA antisense region (stab19)
  misc_feature (21)..(21): 3'-3 attached terminal deoxyabasic moiety, inverted abasic, inverted nucleotide or other terminal cap that is optionally present
  misc_feature (1)..(5): 2'-O-methyl
  misc_feature (6)..(7): 2'-deoxy-2'Fluoro
  misc_feature (8)..(8): 2'-O-methyl
  misc_feature (9)..(12): 2'-deoxy-2'Fluoro
  misc_feature (13)..(19): 2'-O-methyl
  misc_feature (1)..(19): ribonucleotide unmodified or modified as described for this sequence
aggggcugcucuggaaaggtt

SEQ ID NO: 1332 - DNA, 21 bp, Artificial Sequence
  Description of Artificial Sequence: Target Sequence/siNA antisense region (stab22)
  misc_feature (21)..(21): 3'-3 attached terminal deoxyabasic moiety, inverted abasic, inverted nucleotide or other terminal cap that is optionally present
  misc_feature (20)..(20): Phosphorothioate or Phosphorodithioate 3'-Internucleotide Linkage (optionally present)
  misc_feature (1)..(19): ribonucleotide unmodified or modified as described for this sequence
aggggcugcucuggaaaggtt

SEQ ID NO: 1333 - DNA, 21 bp, Artificial Sequence
  Description of Artificial Sequence: Target Sequence/siNA antisense region (stab25)
  misc_feature (4)..(5): 2'-O-methyl
  misc_feature (6)..(7): 2'-deoxy-2'Fluoro
  misc_feature (8)..(8): 2'-O-methyl
  misc_feature (9)..(12): 2'-deoxy-2'Fluoro
  misc_feature (13)..(19): 2'-O-methyl
  misc_feature (20)..(20): Phosphorothioate or Phosphorodithioate 3'-Internucleotide Linkage (optionally present)
  misc_feature (1)..(19): ribonucleotide unmodified or modified as described for this sequence
aggggcugcucuggaaaggtt

SEQ ID NO: 1334 - RNA, 21 nt, Artificial Sequence
  Description of Artificial Sequence: Target Sequence/siNA antisense region (stab35)
  misc_feature (4)..(5): 2'-O-methyl
  misc_feature (6)..(7): 2'-deoxy-2'Fluoro
  misc_feature (8)..(8): 2'-O-methyl
  misc_feature (9)..(12): 2'-deoxy-2'Fluoro
  misc_feature (13)..(21): 2'-O-methyl
aggggcugcucuggaaagguu

SEQ ID NO: 1335 - RNA, 21 nt, Artificial Sequence
  Description of Artificial Sequence: Target Sequence/siNA antisense region (stab36)
  misc_feature (4)..(5): 2'-O-methyl
  misc_feature (6)..(7): 2'-deoxy-2'Fluoro
  misc_feature (8)..(8): 2'-O-methyl
  misc_feature (9)..(12): 2'-deoxy-2'Fluoro
  misc_feature (13)..(21): 2'-O-methyl
aggggcugcucuggaaaggug

SEQ ID NO: 1336 - RNA, 19 nt, Artificial Sequence
  Description of Artificial Sequence: Target Sequence/siNA sense region
uugucccuuggcagcaggg

SEQ ID NO: 1337 - RNA, 19 nt, Artificial Sequence
  Description of Artificial Sequence: Target Sequence/siNA antisense region
cccugcugccaagggacaa

SEQ ID NO: 1338 - DNA, 21 bp, Artificial Sequence
  Description of Artificial Sequence: Target Sequence/siNA sense region (stab00)
  misc_feature (1)..(19): ribonucleotide unmodified or modified as described for this sequence
uugucccuuggcagcagggtt

SEQ ID NO: 1339 - DNA, 21 bp, Artificial Sequence
  Description of Artificial Sequence: Target Sequence/siNA antisense region (stab00as)
  misc_feature (1)..(19): ribonucleotide unmodified or modified as described for this sequence
cccugcugccaagggacaatt

SEQ ID NO: 1340 - DNA, 21 bp, Artificial Sequence
  Description of Artificial Sequence: Target Sequence/siNA sense region (stab04)
  misc_feature (1)..(1): 5'-3 attached terminal deoxyabasic moiety, inverted abasic, inverted nucleotide or other terminal cap that is optionally present
  misc_feature (21)..(21): 3'-3 attached terminal deoxyabasic moiety, inverted abasic, inverted nucleotide or other terminal cap that is optionally present
  misc_feature (1)..(2): 2'-deoxy-2'Fluoro
  misc_feature (4)..(9): 2'-deoxy-2'Fluoro
  misc_feature (12)..(12): 2'-deoxy-2'Fluoro
  misc_feature (15)..(15): 2'-deoxy-2'Fluoro
  misc_feature (1). .(19): ribonucleotide unmodified or modified as described for this sequence
uugucccuuggcagcagggtt

SEQ ID NO: 1341 - DNA, 21 bp, Artificial Sequence
  Description of Artificial Sequence: Target Sequence/siNA antisense region (stab05)
  misc_feature (1)..(4): 2'-deoxy-2'Fluoro
  misc_feature (6)..(7): 2'-deoxy-2'Fluoro
  misc_feature (9)..(10): 2'-deoxy-2'Fluoro
  misc_feature (17)..(17): 2'-deoxy-2'Fluoro
  misc_feature (20)..(20): Phosphorothioate or Phosphorodithioate 3'-Internucleotide Linkage (optionally present)
  misc_feature (1). .(19): ribonucleotide unmodified or modified as described for this sequence
cccugcugccaagggacaatt

SEQ ID NO: 1342 - DNA, 21 bp, Artificial Sequence
  Description of Artificial Sequence: Target Sequence/siNA sense region (stab07)
  misc_feature (1)..(1): 5'-3 attached terminal deoxyabasic moiety, inverted abasic, inverted nucleotide or other terminal cap that is optionally present
  misc_feature (21)..(21): 3'-3 attached terminal deoxyabasic moiety, inverted abasic, inverted nucleotide or other terminal cap that is optionally present
  misc_feature (1)..(2): 2'-deoxy-2'Fluoro
  misc_feature (4)..(9): 2'-deoxy-2'Fluoro
  misc_feature (12)..(12): 2'-deoxy-2'Fluoro
  misc_feature (15)..(15): 2'-deoxy-2'Fluoro
  misc_feature (1)..(19): ribonucleotide unmodified or modified as described for this sequence
uugucccuuggcagcagggtt

SEQ ID NO: 1343 - DNA, 21 bp, Artificial Sequence
  Description of Artificial Sequence: Target Sequence/siNA antisense region (stab08)
  misc_feature (1)..(4): 2'-deoxy-2'Fluoro
  misc_feature (5)..(5): 2'-O-methyl
  misc_feature (6)..(7): 2'-deoxy-2'Fluoro
  misc_feature (8)..(8): 2'-O-methyl
  misc_feature (9)..(10): 2'-deoxy-2'Fluoro
  misc_feature (11)..(16): 2'-O-methyl
  misc_feature (17)..(17): 2'-deoxy-2'Fluoro
  misc_feature (18)..(19): 2'-O-methyl
  misc_feature (20)..(20): Phosphorothioate or Phosphorodithioate 3'-Internucleotide Linkage (optionally present)
  misc_feature (1)..(19): ribonucleotide unmodified or modified as described for this sequence
cccugcugccaagggacaatt

SEQ ID NO: 1344 - DNA, 21 bp, Artificial Sequence
  Description of Artificial Sequence: Target Sequence/siNA sense region (stab09)
  misc_feature (1)..(1): 5'-3 attached terminal deoxyabasic moiety, inverted abasic, inverted nucleotide or other terminal cap that is optionally present
  misc_feature (21)..(21): 3'-3 attached terminal deoxyabasic moiety, inverted abasic, inverted nucleotide or other terminal cap that is optionally present
  misc_feature (1)..(19): ribonucleotide unmodified or modified as described for this sequence
uugucccuuggcagcagggtt

SEQ ID NO: 1345 - DNA, 21 bp, Artificial Sequence
  Description of Artificial Sequence: Target Sequence/siNA antisense region (stab10)
  misc_feature (20)..(20): Phosphorothioate or Phosphorodithioate 3'-Internucleotide Linkage (optionally present)
  misc_feature (1)..(19): ribonucleotide unmodified or modified as described for this sequence
cccugcugccaagggacaatt

SEQ ID NO: 1346 - DNA, 21 bp, Artificial Sequence
  Description of Artificial Sequence: Target Sequence/siNA antisense region (stab19)
  misc_feature (21)..(21): 3'-3 attached terminal deoxyabasic moiety, inverted abasic, inverted nucleotide or other terminal cap that is optionally present
  misc_feature (1)..(4): 2'-deoxy-2'Fluoro
  misc_feature (5)..(5): 2'-O-methyl
  misc_feature (6)..(7): 2'-deoxy-2'Fluoro
  misc_feature (8)..(8): 2'-O-methyl
  misc_feature (9)..(10): 2'-deoxy-2'Fluoro
  misc_feature (11)..(16): 2'-O-methyl
  misc_feature (17)..(17): 2'-deoxy-2'Fluoro
  misc_feature (18)..(19): 2'-O-methyl
  misc_feature (1)..(19): ribonucleotide unmodified or modified as described for this sequence
cccugcugccaagggacaatt

SEQ ID NO: 1347 - DNA, 21 bp, Artificial Sequence
  Description of Artificial Sequence: Target Sequence/siNA antisense region (stab22)
  misc_feature (21)..(21): 3'-3 attached terminal deoxyabasic moiety, inverted abasic, inverted nucleotide or other terminal cap that is optionally present
  misc_feature (20)..(20): Phosphorothioate or Phosphorodithioate 3'-Internucleotide Linkage (optionally present)
  misc_feature (1)..(19): ribonucleotide unmodified or modified as described for this sequence
cccugcugccaagggacaatt

SEQ ID NO: 1348 - DNA, 21 bp, Artificial Sequence
  Description of Artificial Sequence: Target Sequence/siNA antisense region (stab25)
  misc_feature (4)..(4): 2'-deoxy-2'Fluoro
  misc_feature (5)..(5): 2'-O-methyl
  misc_feature (6)..(7): 2'-deoxy-2'Fluoro
  misc_feature (8)..(8): 2'-O-methyl
  misc_feature (9)..(10): 2'-deoxy-2'Fluoro
  misc_feature (11)..(16): 2'-O-methyl
  misc_feature (17)..(17): 2'-deoxy-2'Fluoro
  misc_feature (18)..(19): 2'-O-methyl
  misc_feature (20)..(20): Phosphorothioate or Phosphorodithioate 3'-Internucleotide Linkage (optionally present)
  misc_feature (1)..(19): ribonucleotide unmodified or modified as described for this sequence
cccugcugccaagggacaatt

SEQ ID NO: 1349 - RNA, 21 nt, Artificial Sequence
  Description of Artificial Sequence: Target Sequence/siNA antisense region (stab35)
  misc_feature (4)..(4): 2'-deoxy-2'Fluoro
  misc_feature (5)..(5): 2'-O-methyl
  misc_feature (6)..(7): 2'-deoxy-2'Fluoro
  misc_feature (8)..(8): 2'-O-methyl
  misc_feature (9)..(10): 2'-deoxy-2'Fluoro
  misc_feature (11)..(16): 2'-O-methyl
  misc_feature (17)..(17): 2'-deoxy-2'Fluoro
  misc_feature (18)..(21): 2'-O-methyl
cccugcugccaagggacaauu

SEQ ID NO: 1350 - RNA, 21 nt, Artificial Sequence
  Description of Artificial Sequence: Target Sequence/siNA antisense region (stab36)
  misc_feature (4)..(4): 2'-deoxy-2'Fluoro
  misc_feature (5)..(5): 2'-O-methyl
  misc_feature (6)..(7): 2'-deoxy-2'Fluoro
  misc_feature (8)..(8): 2'-O-methyl
  misc_feature (9)..(10): 2'-deoxy-2'Fluoro
  misc_feature (11)..(16): 2'-O-methyl
  misc_feature (17)..(17): 2'-deoxy-2'Fluoro
  misc_feature (18)..(21): 2'-O-methyl
cccugcugccaagggacaagg

SEQ ID NO: 1351 - RNA, 19 nt, Artificial Sequence
  Description of Artificial Sequence: Target Sequence/siNA sense region
ggcaguggcagcgguggca

SEQ ID NO: 1352 - RNA, 19 nt, Artificial Sequence
  Description of Artificial Sequence: Target Sequence/siNA antisense region
ugccaccgcugccacugcc

SEQ ID NO: 1353 - DNA, 21 bp, Artificial Sequence
  Description of Artificial Sequence: Target Sequence/siNA sense region (stab00)
  misc_feature (1)..(19): ribonucleotide unmodified or modified as described for this sequence
ggcaguggcagcgguggcatt

SEQ ID NO: 1354 - DNA, 21 bp, Artificial Sequence
  Description of Artificial Sequence: Target Sequence/siNA antisense region (stab00as)
  misc_feature (1). .(19): ribonucleotide unmodified or modified as described for this sequence
ugccaccgcugccacugcctt

SEQ ID NO: 1355 - DNA, 21 bp, Artificial Sequence
  Description of Artificial Sequence: Target Sequence/siNA sense region (stab04)
  misc_feature (1)..(1): 5'-3 attached terminal deoxyabasic moiety, inverted abasic, inverted nucleotide or other terminal cap that is optionally present
  misc_feature (21)..(21): 3'-3 attached terminal deoxyabasic moiety, inverted abasic, inverted nucleotide or other terminal cap that is optionally present
  misc_feature (3)..(3): 2'-deoxy-2'Fluoro
  misc_feature (6)..(6): 2'-deoxy-2'Fluoro
  misc_feature (9)..(9): 2'-deoxy-2'Fluoro
  misc_feature (12)..(12): 2'-deoxy-2'Fluoro
  misc_feature (15)..(15): 2'-deoxy-2'Fluoro
  misc_feature (18)..(18): 2'-deoxy-2'Fluoro
  misc_feature (1). .(19): ribonucleotide unmodified or modified as described for this sequence
ggcaguggcagcgguggcatt

SEQ ID NO: 1356 - DNA, 21 bp, Artificial Sequence
  Description of Artificial Sequence: Target Sequence/siNA antisense region (stab05)
  misc_feature (1)..(1): 2'-deoxy-2'Fluoro
  misc_feature (3)..(4): 2'-deoxy-2'Fluoro
  misc_feature (6)..(7): 2'-deoxy-2'Fluoro
  misc_feature (9)..(10): 2'-deoxy-2'Fluoro
  misc_feature (12)..(13): 2'-deoxy-2'Fluoro
  misc_feature (15)..(16): 2'-deoxy-2'Fluoro
  misc_feature (18)..(19): 2'-deoxy-2'Fluoro
  misc_feature (20)..(20): Phosphorothioate or Phosphorodithioate 3'-Internucleotide Linkage (optionally present)
  misc_feature (1). .(19): ribonucleotide unmodified or modified as described for this sequence
ugccaccgcugccacugcctt

SEQ ID NO: 1357 - DNA, 21 bp, Artificial Sequence
  Description of Artificial Sequence: Target Sequence/siNA sense region (stab07)
  misc_feature (1)..(1): 5'-3 attached terminal deoxyabasic moiety, inverted abasic, inverted nucleotide or other terminal cap that is optionally present
  misc_feature (21)..(21): 3'-3 attached terminal deoxyabasic moiety, inverted abasic, inverted nucleotide or other terminal cap that is optionally present
  misc_feature (3)..(3): 2'-deoxy-2'Fluoro
  misc_feature (6)..(6): 2'-deoxy-2'Fluoro
  misc_feature (9)..(9): 2'-deoxy-2'Fluoro
  misc_feature (12)..(12): 2'-deoxy-2'Fluoro
  misc_feature (15)..(15): 2'-deoxy-2'Fluoro
  misc_feature (18)..(18): 2'-deoxy-2'Fluoro
  misc_feature (1)..(19): ribonucleotide unmodified or modified as described for this sequence
ggcaguggcagcgguggcatt

SEQ ID NO: 1358 - DNA, 21 bp, Artificial Sequence
  Description of Artificial Sequence: Target Sequence/siNA antisense region (stab08)
  misc_feature (1)..(1): 2'-deoxy-2'Fluoro
  misc_feature (2)..(2): 2'-O-methyl
  misc_feature (3)..(4): 2'-deoxy-2'Fluoro
  misc_feature (5)..(5): 2'-O-methyl
  misc_feature (6)..(7): 2'-deoxy-2'Fluoro
  misc_feature (8)..(8): 2'-O-methyl
  misc_feature (9)..(10): 2'-deoxy-2'Fluoro
  misc_feature (11)..(11): 2'-O-methyl
  misc_feature (12)..(13): 2'-deoxy-2'Fluoro
  misc_feature (14)..(14): 2'-O-methyl
  misc_feature (15)..(16): 2'-deoxy-2'Fluoro
  misc_feature (17)..(17): 2'-O-methyl
  misc_feature (18)..(19): 2'-deoxy-2'Fluoro
  misc_feature (20)..(20): Phosphorothioate or Phosphorodithioate 3'-Internucleotide Linkage (optionally present)
  misc_feature (1)..(19): ribonucleotide unmodified or modified as described for this sequence
ugccaccgcugccacugcctt

SEQ ID NO: 1359 - DNA, 21 bp, Artificial Sequence
  Description of Artificial Sequence: Target Sequence/siNA sense region (stab09)
  misc_feature (1)..(1): 5'-3 attached terminal deoxyabasic moiety, inverted abasic, inverted nucleotide or other terminal cap that is optionally present
  misc_feature (21)..(21): 3'-3 attached terminal deoxyabasic moiety, inverted abasic, inverted nucleotide or other terminal cap that is optionally present
  misc_feature (1)..(19): ribonucleotide unmodified or modified as described for this sequence
ggcaguggcagcgguggcatt

SEQ ID NO: 1360 - DNA, 21 bp, Artificial Sequence
  Description of Artificial Sequence: Target Sequence/siNA antisense region (stab10)
  misc_feature (20)..(20): Phosphorothioate or Phosphorodithioate 3'-Internucleotide Linkage (optionally present)
  misc_feature (1)..(19): ribonucleotide unmodified or modified as described for this sequence
ugccaccgcugccacugcctt

SEQ ID NO: 1361 - DNA, 21 bp, Artificial Sequence
  Description of Artificial Sequence: Target Sequence/siNA antisense region (stab19)
  misc_feature (21)..(21): 3'-3 attached terminal deoxyabasic moiety, inverted abasic, inverted nucleotide or other terminal cap that is optionally present
  misc_feature (1)..(1): 2'-deoxy-2'Fluoro
  misc_feature (2)..(2): 2'-O-methyl
  misc_feature (3)..(4): 2'-deoxy-2'Fluoro
  misc_feature (5)..(5): 2'-O-methyl
  misc_feature (6)..(7): 2'-deoxy-2'Fluoro
  misc_feature (8)..(8): 2'-O-methyl
  misc_feature (9)..(10): 2'-deoxy-2'Fluoro
  misc_feature (11)..(11): 2'-O-methyl
  misc_feature (12)..(13): 2'-deoxy-2'Fluoro
  misc_feature (14)..(14): 2'-O-methyl
  misc_feature (15)..(16): 2'-deoxy-2'Fluoro
  misc_feature (17)..(17): 2'-O-methyl
  misc_feature (18)..(19): 2'-deoxy-2'Fluoro
  misc_feature (1)..(19): ribonucleotide unmodified or modified as described for this sequence
ugccaccgcugccacugcctt

SEQ ID NO: 1362 - DNA, 21 bp, Artificial Sequence
  Description of Artificial Sequence: Target Sequence/siNA antisense region (stab22)
  misc_feature (21)..(21): 3'-3 attached terminal deoxyabasic moiety, inverted abasic, inverted nucleotide or other terminal cap that is optionally present
  misc_feature (20)..(20): Phosphorothioate or Phosphorodithioate 3'-Internucleotide Linkage (optionally present)
  misc_feature (1)..(19): ribonucleotide unmodified or modified as described for this sequence
ugccaccgcugccacugcctt

SEQ ID NO: 1363 - DNA, 21 bp, Artificial Sequence
  Description of Artificial Sequence: Target Sequence/siNA antisense region (stab25)
  misc_feature (4)..(4): 2'-deoxy-2'Fluoro
  misc_feature (5)..(5): 2'-O-methyl
  misc_feature (6)..(7): 2'-deoxy-2'Fluoro
  misc_feature (8)..(8): 2'-O-methyl
  misc_feature (9)..(10): 2'-deoxy-2'Fluoro
  misc_feature (11)..(11): 2'-O-methyl
  misc_feature (12)..(13): 2'-deoxy-2'Fluoro
  misc_feature (14)..(14): 2'-O-methyl
  misc_feature (15)..(16): 2'-deoxy-2'Fluoro
  misc_feature (17)..(17): 2'-O-methyl
  misc_feature (18)..(19): 2'-deoxy-2'Fluoro
  misc_feature (20)..(20): Phosphorothioate or Phosphorodithioate 3'-Internucleotide Linkage (optionally present)
  misc_feature (1). .(19): ribonucleotide unmodified or modified as described for this sequence
ugccaccgcugccacugcctt

SEQ ID NO: 1364 - RNA, 21 nt, Artificial Sequence
  Description of Artificial Sequence: Target Sequence/siNA antisense region (stab35)
  misc_feature (4)..(4): 2'-deoxy-2'Fluoro
  misc_feature (5)..(5): 2'-O-methyl
  misc_feature (6)..(7): 2'-deoxy-2'Fluoro
  misc_feature (8)..(8): 2'-O-methyl
  misc_feature (9)..(10): 2'-deoxy-2'Fluoro
  misc_feature (11)..(11): 2'-O-methyl
  misc_feature (12)..(13): 2'-deoxy-2'Fluoro
  misc_feature (14)..(14): 2'-O-methyl
  misc_feature (15)..(16): 2'-deoxy-2'Fluoro
  misc_feature (17)..(17): 2'-O-methyl
  misc_feature (18)..(19): 2'-deoxy-2'Fluoro
  misc_feature (20)..(21): 2'-O-methyl
ugccaccgcugccacugccuu

SEQ ID NO: 1365 - RNA, 21 nt, Artificial Sequence
  Description of Artificial Sequence: Target Sequence/siNA antisense region (stab36)
  misc_feature (4)..(4): 2'-deoxy-2'Fluoro
  misc_feature (5)..(5): 2'-O-methyl
  misc_feature (6)..(7): 2'-deoxy-2'Fluoro
  misc_feature (8)..(8): 2'-O-methyl
  misc_feature (9)..(10): 2'-deoxy-2'Fluoro
  misc_feature (11)..(11): 2'-O-methyl
  misc_feature (12)..(13): 2'-deoxy-2'Fluoro
  misc_feature (14)..(14): 2'-O-methyl
  misc_feature (15)..(16): 2'-deoxy-2'Fluoro
  misc_feature (17)..(17): 2'-O-methyl
  misc_feature (18)..(19): 2'-deoxy-2'Fluoro
  misc_feature (20)..(21): 2'-O-methyl
ugccaccgcugccacugcccc

SEQ ID NO: 1366 - RNA, 19 nt, Artificial Sequence
  Description of Artificial Sequence: Target Sequence/siNA sense region
aguggcagugacucggagc

SEQ ID NO: 1367 - RNA, 19 nt, Artificial Sequence
  Description of Artificial Sequence: Target Sequence/siNA antisense region
gcuccgagucacugccacu

SEQ ID NO: 1368 - DNA, 21 bp, Artificial Sequence
  Description of Artificial Sequence: Target Sequence/siNA sense region (stab00)
  misc_feature (1)..(19): ribonucleotide unmodified or modified as described for this sequence
aguggcagugacucggagctt

SEQ ID NO: 1369 - DNA, 21 bp, Artificial Sequence
  Description of Artificial Sequence: Target Sequence/siNA antisense region (stab00as)
  misc_feature (1). .(19): ribonucleotide unmodified or modified as described for this sequence
gcuccgagucacugccacutt

SEQ ID NO: 1370 - DNA, 21 bp, Artificial Sequence
  Description of Artificial Sequence: Target Sequence/siNA sense region (stab04)
  misc_feature (1)..(1): 5'-3 attached terminal deoxyabasic moiety, inverted abasic, inverted nucleotide or other terminal cap that is optionally present
  misc_feature (21)..(21): 3'-3 attached terminal deoxyabasic moiety, inverted abasic, inverted nucleotide or other terminal cap that is optionally present
  misc_feature (3)..(3): 2'-deoxy-2'Fluoro
  misc_feature (6)..(6): 2'-deoxy-2'Fluoro
  misc_feature (9)..(9): 2'-deoxy-2'Fluoro
  misc_feature (12)..(14): 2'-deoxy-2'Fluoro
  misc_feature (19)..(19): 2'-deoxy-2'Fluoro
  misc_feature (1)..(19): ribonucleotide unmodified or modified as described for this sequence
aguggcagugacucggagctt

SEQ ID NO: 1371 - DNA, 21 bp, Artificial Sequence
  Description of Artificial Sequence: Target Sequence/siNA antisense region (stab05)
  misc_feature (2)..(5): 2'-deoxy-2'Fluoro
  misc_feature (9)..(10): 2'-deoxy-2'Fluoro
  misc_feature (12)..(13): 2'-deoxy-2'Fluoro
  misc_feature (15)..(16): 2'-deoxy-2'Fluoro
  misc_feature (18)..(19): 2'-deoxy-2'Fluoro
  misc_feature (20)..(20): Phosphorothioate or Phosphorodithioate 3'-Internucleotide Linkage (optionally present)
  misc_feature (1)..(19): ribonucleotide unmodified or modified as described for this sequence
gcuccgagucacugccacutt

SEQ ID NO: 1372 - DNA, 21 bp, Artificial Sequence
  Description of Artificial Sequence: Target Sequence/siNA sense region (stab07)
  misc_feature (1)..(1): 5'-3 attached terminal deoxyabasic moiety, inverted abasic, inverted nucleotide or other terminal cap that is optionally present
  misc_feature (21)..(21): 3'-3 attached terminal deoxyabasic moiety, inverted abasic, inverted nucleotide or other terminal cap that is optionally present
  misc_feature (3)..(3): 2'-deoxy-2'Fluoro
  misc_feature (6)..(6): 2'-deoxy-2'Fluoro
  misc_feature (9)..(9): 2'-deoxy-2'Fluoro
  misc_feature (12)..(14): 2'-deoxy-2'Fluoro
  misc_feature (19)..(19): 2'-deoxy-2'Fluoro
  misc_feature (1)..(19): ribonucleotide unmodified or modified as described for this sequence
aguggcagugacucggagctt

SEQ ID NO: 1373 - DNA, 21 bp, Artificial Sequence
  Description of Artificial Sequence: Target Sequence/siNA antisense region (stab08)
  misc_feature (1)..(1): 2'-O-methyl
  misc_feature (2)..(5): 2'-deoxy-2'Fluoro
  misc_feature (6)..(8): 2'-O-methyl
  misc_feature (9)..(10): 2'-deoxy-2'Fluoro
  misc_feature (11)..(11): 2'-O-methyl
  misc_feature (12)..(13): 2'-deoxy-2'Fluoro
  misc_feature (14)..(14): 2'-O-methyl
  misc_feature (15)..(16): 2'-deoxy-2'Fluoro
  misc_feature (17)..(17): 2'-O-methyl
  misc_feature (18)..(19): 2'-deoxy-2'Fluoro
  misc_feature (20)..(20): Phosphorothioate or Phosphorodithioate 3'-Internucleotide Linkage (optionally present)
  misc_feature (1)..(19): ribonucleotide unmodified or modified as described for this sequence
gcuccgagucacugccacutt

SEQ ID NO: 1374 - DNA, 21 bp, Artificial Sequence
  Description of Artificial Sequence: Target Sequence/siNA sense region (stab09)
  misc_feature (1)..(1): 5'-3 attached terminal deoxyabasic moiety, inverted abasic, inverted nucleotide or other terminal cap that is optionally present
  misc_feature (21)..(21): 3'-3 attached terminal deoxyabasic moiety, inverted abasic, inverted nucleotide or other terminal cap that is optionally present
  misc_feature (1)..(19): ribonucleotide unmodified or modified as described for this sequence
aguggcagugacucggagctt

SEQ ID NO: 1375 - DNA, 21 bp, Artificial Sequence
  Description of Artificial Sequence: Target Sequence/siNA antisense region (stab10)
  misc_feature (20)..(20): Phosphorothioate or Phosphorodithioate 3'-Internucleotide Linkage (optionally present)
  misc_feature (1)..(19): ribonucleotide unmodified or modified as described for this sequence
gcuccgagucacugccacutt

SEQ ID NO: 1376 - DNA, 21 bp, Artificial Sequence
  Description of Artificial Sequence: Target Sequence/siNA antisense region (stab19)
  misc_feature (21)..(21): 3'-3 attached terminal deoxyabasic moiety, inverted abasic, inverted nucleotide or other terminal cap that is optionally present
  misc_feature (1)..(1): 2'-O-methyl
  misc_feature (2)..(5): 2'-deoxy-2'Fluoro
  misc_feature (6)..(8): 2'-O-methyl
  misc_feature (9)..(10): 2'-deoxy-2'Fluoro
  misc_feature (11)..(11): 2'-O-methyl
  misc_feature (12)..(13): 2'-deoxy-2'Fluoro
  misc_feature (14)..(14): 2'-O-methyl
  misc_feature (15)..(16): 2'-deoxy-2'Fluoro
  misc_feature (17)..(17): 2'-O-methyl
  misc_feature (18)..(19): 2'-deoxy-2'Fluoro
  misc_feature (1)..(19): ribonucleotide unmodified or modified as described for this sequence
gcuccgagucacugccacutt

SEQ ID NO: 1377 - DNA, 21 bp, Artificial Sequence
  Description of Artificial Sequence: Target Sequence/siNA antisense region (stab22)
  misc_feature (21)..(21): 3'-3 attached terminal deoxyabasic moiety, inverted abasic, inverted nucleotide or other terminal cap that is optionally present
  misc_feature (20)..(20): Phosphorothioate or Phosphorodithioate 3'-Internucleotide Linkage (optionally present)
  misc_feature (1)..(19): ribonucleotide unmodified or modified as described for this sequence
gcuccgagucacugccacutt

SEQ ID NO: 1378 - DNA, 21 bp, Artificial Sequence
  Description of Artificial Sequence: Target Sequence/siNA antisense region (stab25)
  misc_feature (4)..(5): 2'-deoxy-2'Fluoro
  misc_feature (6)..(8): 2'-O-methyl
  misc_feature (9)..(10): 2'-deoxy-2'Fluoro
  misc_feature (11)..(11): 2'-O-methyl
  misc_feature (12)..(13): 2'-deoxy-2'Fluoro
  misc_feature (14)..(14): 2'-O-methyl
  misc_feature (15)..(16): 2'-deoxy-2'Fluoro
  misc_feature (17)..(17): 2'-O-methyl
  misc_feature (18)..(19): 2'-deoxy-2'Fluoro
  misc_feature (20)..(20): Phosphorothioate or Phosphorodithioate 3'-Internucleotide Linkage (optionally present)
  misc_feature (1). .(19): ribonucleotide unmodified or modified as described for this sequence
gcuccgagucacugccacutt

SEQ ID NO: 1379 - RNA, 21 nt, Artificial Sequence
  Description of Artificial Sequence: Target Sequence/siNA antisense region (stab35)
  misc_feature (4)..(5): 2'-deoxy-2'Fluoro
  misc_feature (6)..(8): 2'-O-methyl
  misc_feature (9)..(10): 2'-deoxy-2'Fluoro
  misc_feature (11)..(11): 2'-O-methyl
  misc_feature (12)..(13): 2'-deoxy-2'Fluoro
  misc_feature (14)..(14): 2'-O-methyl
  misc_feature (15)..(16): 2'-deoxy-2'Fluoro
  misc_feature (17)..(17): 2'-O-methyl
  misc_feature (18)..(19): 2'-deoxy-2'Fluoro
  misc_feature (20)..(21): 2'-O-methyl
gcuccgagucacugccacuuu

SEQ ID NO: 1380 - RNA, 21 nt, Artificial Sequence
  Description of Artificial Sequence: Target Sequence/siNA antisense region (stab36)
  misc_feature (4)..(5): 2'-deoxy-2'Fluoro
  misc_feature (6)..(8): 2'-O-methyl
  misc_feature (9)..(10): 2'-deoxy-2'Fluoro
  misc_feature (11)..(11): 2'-O-methyl
  misc_feature (12)..(13): 2'-deoxy-2'Fluoro
  misc_feature (14)..(14): 2'-O-methyl
  misc_feature (15)..(16): 2'-deoxy-2'Fluoro
  misc_feature (17)..(17): 2'-O-methyl
  misc_feature (18)..(19): 2'-deoxy-2'Fluoro
  misc_feature (20)..(21): 2'-O-methyl
gcuccgagucacugccacugc

SEQ ID NO: 1381 - RNA, 19 nt, Artificial Sequence
  Description of Artificial Sequence: Target Sequence/siNA sense region
ccugacagcccagucuuug

SEQ ID NO: 1382 - RNA, 19 nt, Artificial Sequence
  Description of Artificial Sequence: Target Sequence/siNA antisense region
caaagacugggcugucagg

SEQ ID NO: 1383 - DNA, 21 bp, Artificial Sequence
  Description of Artificial Sequence: Target Sequence/siNA sense region (stab00)
  misc_feature (1)..(19): ribonucleotide unmodified or modified as described for this sequence
ccugacagcccagucuuugtt

SEQ ID NO: 1384 - DNA, 21 bp, Artificial Sequence
  Description of Artificial Sequence: Target Sequence/siNA antisense region (stab00as)
  misc_feature (1)..(19): ribonucleotide unmodified or modified as described for this sequence
caaagacugggcugucaggtt

SEQ ID NO: 1385 - DNA, 21 bp, Artificial Sequence
  Description of Artificial Sequence: Target Sequence/siNA sense region (stab04)
  misc_feature (1)..(1): 5'-3 attached terminal deoxyabasic moiety, inverted abasic, inverted nucleotide or other terminal cap that is optionally present
  misc_feature (21)..(21): 3'-3 attached terminal deoxyabasic moiety, inverted abasic, inverted nucleotide or other terminal cap that is optionally present
  misc_feature (1)..(3): 2'-deoxy-2'Fluoro
  misc_feature (6)..(6): 2'-deoxy-2'Fluoro
  misc_feature (9)..(11): 2'-deoxy-2'Fluoro
  misc_feature (14)..(18): 2'-deoxy-2'Fluoro
  misc_feature (1). .(19): ribonucleotide unmodified or modified as described for this sequence
ccugacagcccagucuuugtt

SEQ ID NO: 1386 - DNA, 21 bp, Artificial Sequence
  Description of Artificial Sequence: Target Sequence/siNA antisense region (stab05)
  misc_feature (1)..(1): 2'-deoxy-2'Fluoro
  misc_feature (7)..(8): 2'-deoxy-2'Fluoro
  misc_feature (12)..(13): 2'-deoxy-2'Fluoro
  misc_feature (15)..(16): 2'-deoxy-2'Fluoro
  misc_feature (20)..(20): Phosphorothioate or Phosphorodithioate 3'-Internucleotide Linkage (optionally present)
  misc_feature (1). .(19): ribonucleotide unmodified or modified as described for this sequence
caaagacugggcugucaggtt

SEQ ID NO: 1387 - DNA, 21 bp, Artificial Sequence
  Description of Artificial Sequence: Target Sequence/siNA sense region (stab07)
  misc_feature (1)..(1): 5'-3 attached terminal deoxyabasic moiety, inverted abasic, inverted nucleotide or other terminal cap that is optionally present
  misc_feature (21)..(21): 3'-3 attached terminal deoxyabasic moiety, inverted abasic, inverted nucleotide or other terminal cap that is optionally present
  misc_feature (1)..(3): 2'-deoxy-2'Fluoro
  misc_feature (6)..(6): 2'-deoxy-2'Fluoro
  misc_feature (9)..(11): 2'-deoxy-2'Fluoro
  misc_feature (14)..(18): 2'-deoxy-2'Fluoro
  misc_feature (1)..(19): ribonucleotide unmodified or modified as described for this sequence
ccugacagcccagucuuugtt

SEQ ID NO: 1388 - DNA, 21 bp, Artificial Sequence
  Description of Artificial Sequence: Target Sequence/siNA antisense region (stab08)
  misc_feature (1)..(1): 2'-deoxy-2'Fluoro
  misc_feature (2)..(6): 2'-O-methyl
  misc_feature (7)..(8): 2'-deoxy-2'Fluoro
  misc_feature (9)..(11): 2'-O-methyl
  misc_feature (12)..(13): 2'-deoxy-2'Fluoro
  misc_feature (14)..(14): 2'-O-methyl
  misc_feature (15)..(16): 2'-deoxy-2'Fluoro
  misc_feature (17)..(19): 2'-O-methyl
  misc_feature (20)..(20): Phosphorothioate or Phosphorodithioate 3'-Internucleotide Linkage (optionally present)
  misc_feature (1)..(19): ribonucleotide unmodified or modified as described for this sequence
caaagacugggcugucaggtt

SEQ ID NO: 1389 - DNA, 21 bp, Artificial Sequence
  Description of Artificial Sequence: Target Sequence/siNA sense region (stab09)
  misc_feature (1)..(1): 5'-3 attached terminal deoxyabasic moiety, inverted abasic, inverted nucleotide or other terminal cap that is optionally present
  misc_feature (21)..(21): 3'-3 attached terminal deoxyabasic moiety, inverted abasic, inverted nucleotide or other terminal cap that is optionally present
  misc_feature (1)..(19): ribonucleotide unmodified or modified as described for this sequence
ccugacagcccagucuuugtt

SEQ ID NO: 1390 - DNA, 21 bp, Artificial Sequence
  Description of Artificial Sequence: Target Sequence/siNA antisense region (stab10)
  misc_feature (20)..(20): Phosphorothioate or Phosphorodithioate 3'-Internucleotide Linkage (optionally present)
  misc_feature (1)..(19): ribonucleotide unmodified or modified as described for this sequence
caaagacugggcugucaggtt

SEQ ID NO: 1391 - DNA, 21 bp, Artificial Sequence
  Description of Artificial Sequence: Target Sequence/siNA antisense region (stab19)
  misc_feature (21)..(21): 3'-3 attached terminal deoxyabasic moiety, inverted abasic, inverted nucleotide or other terminal cap that is optionally present
  misc_feature (1)..(1): 2'-deoxy-2'Fluoro
  misc_feature (2)..(6): 2'-O-methyl
  misc_feature (7)..(8): 2'-deoxy-2'Fluoro
  misc_feature (9)..(11): 2'-O-methyl
  misc_feature (12)..(13): 2'-deoxy-2'Fluoro
  misc_feature (14)..(14): 2'-O-methyl
  misc_feature (15)..(16): 2'-deoxy-2'Fluoro
  misc_feature (17)..(19): 2'-O-methyl
  misc_feature (1)..(19): ribonucleotide unmodified or modified as described for this sequence
caaagacugggcugucaggtt

SEQ ID NO: 1392 - DNA, 21 bp, Artificial Sequence
  Description of Artificial Sequence: Target Sequence/siNA antisense region (stab22)
  misc_feature (21)..(21): 3'-3 attached terminal deoxyabasic moiety, inverted abasic, inverted nucleotide or other terminal cap that is optionally present
  misc_feature (20)..(20): Phosphorothioate or Phosphorodithioate 3'-Internucleotide Linkage (optionally present)
  misc_feature (1)..(19): ribonucleotide unmodified or modified as described for this sequence
caaagacugggcugucaggtt

SEQ ID NO: 1393 - DNA, 21 bp, Artificial Sequence
  Description of Artificial Sequence: Target Sequence/siNA antisense region (stab25)
  misc_feature (4)..(6): 2'-O-methyl
  misc_feature (7)..(8): 2'-deoxy-2'Fluoro
  misc_feature (9)..(11): 2'-O-methyl
  misc_feature (12)..(13): 2'-deoxy-2'Fluoro
  misc_feature (14)..(14): 2'-O-methyl
  misc_feature (15)..(16): 2'-deoxy-2'Fluoro
  misc_feature (17)..(19): 2'-O-methyl
  misc_feature (20)..(20): Phosphorothioate or Phosphorodithioate 3'-Internucleotide Linkage (optionally present)
  misc_feature (1)..(19): ribonucleotide unmodified or modified as described for this sequence
caaagacugggcugucaggtt

SEQ ID NO: 1394 - RNA, 21 nt, Artificial Sequence
  Description of Artificial Sequence: Target Sequence/siNA antisense region (stab35)
  misc_feature (4)..(6): 2'-O-methyl
  misc_feature (7)..(8): 2'-deoxy-2'Fluoro
  misc_feature (9)..(11): 2'-O-methyl
  misc_feature (12)..(13): 2'-deoxy-2'Fluoro
  misc_feature (14)..(14): 2'-O-methyl
  misc_feature (15)..(16): 2'-deoxy-2'Fluoro
  misc_feature (17)..(21): 2'-O-methyl
caaagacugggcugucagguu

SEQ ID NO: 1395 - RNA, 21 nt, Artificial Sequence
  Description of Artificial Sequence: Target Sequence/siNA antisense region (stab36)
  misc_feature (4)..(6): 2'-O-methyl
  misc_feature (7)..(8): 2'-deoxy-2'Fluoro
  misc_feature (9)..(11): 2'-O-methyl
  misc_feature (12)..(13): 2'-deoxy-2'Fluoro
  misc_feature (14)..(14): 2'-O-methyl
  misc_feature (15)..(16): 2'-deoxy-2'Fluoro
  misc_feature (17)..(21): 2'-O-methyl
caaagacugggcugucaggcu

SEQ ID NO: 1396 - RNA, 19 nt, Artificial Sequence
  Description of Artificial Sequence: Target Sequence/siNA sense region
gaggacagcaaggcaaagc

SEQ ID NO: 1397 - RNA, 19 nt, Artificial Sequence
  Description of Artificial Sequence: Target Sequence/siNA antisense region
gcuuugccuugcuguccuc

SEQ ID NO: 1398 - DNA, 21 bp, Artificial Sequence
  Description of Artificial Sequence: Target Sequence/siNA sense region (stab00)
  misc_feature (1)..(19): ribonucleotide unmodified or modified as described for this sequence
gaggacagcaaggcaaagctt

SEQ ID NO: 1399 - DNA, 21 bp, Artificial Sequence
  Description of Artificial Sequence: Target Sequence/siNA antisense region (stab00as)
  misc_feature (1)..(19): ribonucleotide unmodified or modified as described for this sequence
gcuuugccuugcuguccuctt

SEQ ID NO: 1400 - DNA, 21 bp, Artificial Sequence
  Description of Artificial Sequence: Target Sequence/siNA sense region (stab04)
  misc_feature (1)..(1): 5'-3 attached terminal deoxyabasic moiety, inverted abasic, inverted nucleotide or other terminal cap that is optionally present
  misc_feature (21)..(21): 3'-3 attached terminal deoxyabasic moiety, inverted abasic, inverted nucleotide or other terminal cap that is optionally present
  misc_feature (6)..(6): 2'-deoxy-2'Fluoro
  misc_feature (9)..(9): 2'-deoxy-2'Fluoro
  misc_feature (14)..(14): 2'-deoxy-2'Fluoro
  misc_feature (19)..(19): 2'-deoxy-2'Fluoro
  misc_feature (1). .(19): ribonucleotide unmodified or modified as described for this sequence
gaggacagcaaggcaaagctt

SEQ ID NO: 1401 - DNA, 21 bp, Artificial Sequence
  Description of Artificial Sequence: Target Sequence/siNA antisense region (stab05)
  misc_feature (2)..(5): 2'-deoxy-2'Fluoro
  misc_feature (7)..(10): 2'-deoxy-2'Fluoro
  misc_feature (12)..(13): 2'-deoxy-2'Fluoro
  misc_feature (15)..(19): 2'-deoxy-2'Fluoro
  misc_feature (20)..(20): Phosphorothioate or Phosphorodithioate 3'-Internucleotide Linkage (optionally present)
  misc_feature (1). .(19): ribonucleotide unmodified or modified as described for this sequence
gcuuugccuugcuguccuctt

SEQ ID NO: 1402 - DNA, 21 bp, Artificial Sequence
  Description of Artificial Sequence: Target Sequence/siNA sense region (stab07)
  misc_feature (1)..(1): 5'-3 attached terminal deoxyabasic moiety, inverted abasic, inverted nucleotide or other terminal cap that is optionally present
  misc_feature (21)..(21): 3'-3 attached terminal deoxyabasic moiety, inverted abasic, inverted nucleotide or other terminal cap that is optionally present
  misc_feature (6)..(6): 2'-deoxy-2'Fluoro
  misc_feature (9)..(9): 2'-deoxy-2'Fluoro
  misc_feature (14)..(14): 2'-deoxy-2'Fluoro
  misc_feature (19)..(19): 2'-deoxy-2'Fluoro
  misc_feature (1)..(19): ribonucleotide unmodified or modified as described for this sequence
gaggacagcaaggcaaagctt

SEQ ID NO: 1403 - DNA, 21 bp, Artificial Sequence
  Description of Artificial Sequence: Target Sequence/siNA antisense region (stab08)
  misc_feature (1)..(1): 2'-O-methyl
  misc_feature (2)..(5): 2'-deoxy-2'Fluoro
  misc_feature (6)..(6): 2'-O-methyl
  misc_feature (7)..(10): 2'-deoxy-2'Fluoro
  misc_feature (11)..(11): 2'-O-methyl
  misc_feature (12)..(13): 2'-deoxy-2'Fluoro
  misc_feature (14)..(14): 2'-O-methyl
  misc_feature (15)..(19): 2'-deoxy-2'Fluoro
  misc_feature (20)..(20): Phosphorothioate or Phosphorodithioate 3'-Internucleotide Linkage (optionally present)
  misc_feature (1)..(19): ribonucleotide unmodified or modified as described for this sequence
gcuuugccuugcuguccuctt

SEQ ID NO: 1404 - DNA, 21 bp, Artificial Sequence
  Description of Artificial Sequence: Target Sequence/siNA sense region (stab09)
  misc_feature (1)..(1): 5'-3 attached terminal deoxyabasic moiety, inverted abasic, inverted nucleotide or other terminal cap that is optionally present
  misc_feature (21)..(21): 3'-3 attached terminal deoxyabasic moiety, inverted abasic, inverted nucleotide or other terminal cap that is optionally present
  misc_feature (1)..(19): ribonucleotide unmodified or modified as described for this sequence
gaggacagcaaggcaaagctt

SEQ ID NO: 1405 - DNA, 21 bp, Artificial Sequence
  Description of Artificial Sequence: Target Sequence/siNA antisense region (stab10)
  misc_feature (20)..(20): Phosphorothioate or Phosphorodithioate 3'-Internucleotide Linkage (optionally present)
  misc_feature (1)..(19): ribonucleotide unmodified or modified as described for this sequence
gcuuugccuugcuguccuctt

SEQ ID NO: 1406 - DNA, 21 bp, Artificial Sequence
  Description of Artificial Sequence: Target Sequence/siNA antisense region (stab19)
  misc_feature (21)..(21): 3'-3 attached terminal deoxyabasic moiety, inverted abasic, inverted nucleotide or other terminal cap that is optionally present
  misc_feature (1)..(1): 2'-O-methyl
  misc_feature (2)..(5): 2'-deoxy-2'Fluoro
  misc_feature (6)..(6): 2'-O-methyl
  misc_feature (7)..(10): 2'-deoxy-2'Fluoro
  misc_feature (11)..(11): 2'-O-methyl
  misc_feature (12)..(13): 2'-deoxy-2'Fluoro
  misc_feature (14)..(14): 2'-O-methyl
  misc_feature (15)..(19): 2'-deoxy-2'Fluoro
  misc_feature (1)..(19): ribonucleotide unmodified or modified as described for this sequence
gcuuugccuugcuguccuctt

SEQ ID NO: 1407 - DNA, 21 bp, Artificial Sequence
  Description of Artificial Sequence: Target Sequence/siNA antisense region (stab22)
  misc_feature (21)..(21): 3'-3 attached terminal deoxyabasic moiety, inverted abasic, inverted nucleotide or other terminal cap that is optionally present
  misc_feature (20)..(20): Phosphorothioate or Phosphorodithioate 3'-Internucleotide Linkage (optionally present)
  misc_feature (1)..(19): ribonucleotide unmodified or modified as described for this sequence
gcuuugccuugcuguccuctt

SEQ ID NO: 1408 - DNA, 21 bp, Artificial Sequence
  Description of Artificial Sequence: Target Sequence/siNA antisense region (stab25)
  misc_feature (4)..(5): 2'-deoxy-2'Fluoro
  misc_feature (6)..(6): 2'-O-methyl
  misc_feature (7)..(10): 2'-deoxy-2'Fluoro
  misc_feature (11)..(11): 2'-O-methyl
  misc_feature (12)..(13): 2'-deoxy-2'Fluoro
  misc_feature (14)..(14): 2'-O-methyl
  misc_feature (15)..(19): 2'-deoxy-2'Fluoro
  misc_feature (20)..(20): Phosphorothioate or Phosphorodithioate 3'-Internucleotide Linkage (optionally present)
  misc_feature (1). .(19): ribonucleotide unmodified or modified as described for this sequence
gcuuugccuugcuguccuctt

SEQ ID NO: 1409 - RNA, 21 nt, Artificial Sequence
  Description of Artificial Sequence: Target Sequence/siNA antisense region (stab35)
  misc_feature (4)..(5): 2'-deoxy-2'Fluoro
  misc_feature (6)..(6): 2'-O-methyl
  misc_feature (7)..(10): 2'-deoxy-2'Fluoro
  misc_feature (11)..(11): 2'-O-methyl
  misc_feature (12)..(13): 2'-deoxy-2'Fluoro
  misc_feature (14)..(14): 2'-O-methyl
  misc_feature (15)..(19): 2'-deoxy-2'Fluoro
  misc_feature (20)..(21): 2'-O-methyl
gcuuugccuugcuguccucuu

SEQ ID NO: 1410 - RNA, 21 nt, Artificial Sequence
  Description of Artificial Sequence: Target Sequence/siNA antisense region (stab36)
  misc_feature (4)..(5): 2'-deoxy-2'Fluoro
  misc_feature (6)..(6): 2'-O-methyl
  misc_feature (7)..(10): 2'-deoxy-2'Fluoro
  misc_feature (11)..(11): 2'-O-methyl
  misc_feature (12)..(13): 2'-deoxy-2'Fluoro
  misc_feature (14)..(14): 2'-O-methyl
  misc_feature (15)..(19): 2'-deoxy-2'Fluoro
  misc_feature (20)..(21): 2'-O-methyl
gcuuugccuugcuguccucaa

SEQ ID NO: 1411 - RNA, 19 nt, Artificial Sequence
  Description of Artificial Sequence: Target Sequence/siNA sense region
ccagagcagcggccgucuc

SEQ ID NO: 1412 - RNA, 19 nt, Artificial Sequence
  Description of Artificial Sequence: Target Sequence/siNA antisense region
gagacggccgcugcucugg

SEQ ID NO: 1413 - DNA, 21 bp, Artificial Sequence
  Description of Artificial Sequence: Target Sequence/siNA sense region (stab00)
  misc_feature (1)..(19): ribonucleotide unmodified or modified as described for this sequence
ccagagcagcggccgucuctt

SEQ ID NO: 1414 - DNA, 21 bp, Artificial Sequence
  Description of Artificial Sequence: Target Sequence/siNA antisense region (stab00as)
  misc_feature (1)..(19): ribonucleotide unmodified or modified as described for this sequence
gagacggccgcugcucuggtt

SEQ ID NO: 1415 - DNA, 21 bp, Artificial Sequence
  Description of Artificial Sequence: Target Sequence/siNA sense region (stab04)
  misc_feature (1)..(1): 5'-3 attached terminal deoxyabasic moiety, inverted abasic, inverted nucleotide or other terminal cap that is optionally present
  misc_feature (21)..(21): 3'-3 attached terminal deoxyabasic moiety, inverted abasic, inverted nucleotide or other terminal cap that is optionally present
  misc_feature (1)..(2): 2'-deoxy-2'Fluoro
  misc_feature (7)..(7): 2'-deoxy-2'Fluoro
  misc_feature (10)..(10): 2'-deoxy-2'Fluoro
  misc_feature (13)..(14): 2'-deoxy-2'Fluoro
  misc_feature (16)..(19): 2'-deoxy-2'Fluoro
  misc_feature (1). .(19): ribonucleotide unmodified or modified as described for this sequence
ccagagcagcggccgucuctt

SEQ ID NO: 1416 - DNA, 21 bp, Artificial Sequence
  Description of Artificial Sequence: Target Sequence/siNA antisense region (stab05)
  misc_feature (5)..(5): 2'-deoxy-2'Fluoro
  misc_feature (8)..(9): 2'-deoxy-2'Fluoro
  misc_feature (11)..(12): 2'-deoxy-2'Fluoro
  misc_feature (14)..(17): 2'-deoxy-2'Fluoro
  misc_feature (20)..(20): Phosphorothioate or Phosphorodithioate 3'-Internucleotide Linkage (optionally present)
  misc_feature (1). .(19): ribonucleotide unmodified or modified as described for this sequence
gagacggccgcugcucuggtt

SEQ ID NO: 1417 - DNA, 21 bp, Artificial Sequence
  Description of Artificial Sequence: Target Sequence/siNA sense region (stab07)
  misc_feature (1)..(1): 5'-3 attached terminal deoxyabasic moiety, inverted abasic, inverted nucleotide or other terminal cap that is optionally present
  misc_feature (21)..(21): 3'-3 attached terminal deoxyabasic moiety, inverted abasic, inverted nucleotide or other terminal cap that is optionally present
  misc_feature (1)..(2): 2'-deoxy-2'Fluoro
  misc_feature (7)..(7): 2'-deoxy-2'Fluoro
  misc_feature (10)..(10): 2'-deoxy-2'Fluoro
  misc_feature (13)..(14): 2'-deoxy-2'Fluoro
  misc_feature (16)..(19): 2'-deoxy-2'Fluoro
  misc_feature (1)..(19): ribonucleotide unmodified or modified as described for this sequence
ccagagcagcggccgucuctt

SEQ ID NO: 1418 - DNA, 21 bp, Artificial Sequence
  Description of Artificial Sequence: Target Sequence/siNA antisense region (stab08)
  misc_feature (1)..(4): 2'-O-methyl
  misc_feature (5)..(5): 2'-deoxy-2'Fluoro
  misc_feature (6)..(7): 2'-O-methyl
  misc_feature (8)..(9): 2'-deoxy-2'Fluoro
  misc_feature (10)..(10): 2'-O-methyl
  misc_feature (11)..(12): 2'-deoxy-2'Fluoro
  misc_feature (13)..(13): 2'-O-methyl
  misc_feature (14)..(17): 2'-deoxy-2'Fluoro
  misc_feature (18)..(19): 2'-O-methyl
  misc_feature (20)..(20): Phosphorothioate or Phosphorodithioate 3'-Internucleotide Linkage (optionally present)
  misc_feature (1)..(19): ribonucleotide unmodified or modified as described for this sequence
gagacggccgcugcucuggtt

SEQ ID NO: 1419 - DNA, 21 bp, Artificial Sequence
  Description of Artificial Sequence: Target Sequence/siNA sense region (stab09)
  misc_feature (1)..(1): 5'-3 attached terminal deoxyabasic moiety, inverted abasic, inverted nucleotide or other terminal cap that is optionally present
  misc_feature (21)..(21): 3'-3 attached terminal deoxyabasic moiety, inverted abasic, inverted nucleotide or other terminal cap that is optionally present
  misc_feature (1)..(19): ribonucleotide unmodified or modified as described for this sequence
ccagagcagcggccgucuctt

SEQ ID NO: 1420 - DNA, 21 bp, Artificial Sequence
  Description of Artificial Sequence: Target Sequence/siNA antisense region (stab10)
  misc_feature (20)..(20): Phosphorothioate or Phosphorodithioate 3'-Internucleotide Linkage (optionally present)
  misc_feature (1)..(19): ribonucleotide unmodified or modified as described for this sequence
gagacggccgcugcucuggtt

SEQ ID NO: 1421 - DNA, 21 bp, Artificial Sequence
  Description of Artificial Sequence: Target Sequence/siNA antisense region (stab19)
  misc_feature (21)..(21): 3'-3 attached terminal deoxyabasic moiety, inverted abasic, inverted nucleotide or other terminal cap that is optionally present
  misc_feature (1)..(4): 2'-O-methyl
  misc_feature (5)..(5): 2'-deoxy-2'Fluoro
  misc_feature (6)..(7): 2'-O-methyl
  misc_feature (8)..(9): 2'-deoxy-2'Fluoro
  misc_feature (10)..(10): 2'-O-methyl
  misc_feature (11)..(12): 2'-deoxy-2'Fluoro
  misc_feature (13)..(13): 2'-O-methyl
  misc_feature (14)..(17): 2'-deoxy-2'Fluoro
  misc_feature (18)..(19): 2'-O-methyl
  misc_feature (1)..(19): ribonucleotide unmodified or modified as described for this sequence
gagacggccgcugcucuggtt

SEQ ID NO: 1422 - DNA, 21 bp, Artificial Sequence
  Description of Artificial Sequence: Target Sequence/siNA antisense region (stab22)
  misc_feature (21)..(21): 3'-3 attached terminal deoxyabasic moiety, inverted abasic, inverted nucleotide or other terminal cap that is optionally present
  misc_feature (20)..(20): Phosphorothioate or Phosphorodithioate 3'-Internucleotide Linkage (optionally present)
  misc_feature (1)..(19): ribonucleotide unmodified or modified as described for this sequence
gagacggccgcugcucuggtt

SEQ ID NO: 1423 - DNA, 21 bp, Artificial Sequence
  Description of Artificial Sequence: Target Sequence/siNA antisense region (stab25)
  misc_feature (4)..(4): 2'-O-methyl
  misc_feature (5)..(5): 2'-deoxy-2'Fluoro
  misc_feature (6)..(7): 2'-O-methyl
  misc_feature (8)..(9): 2'-deoxy-2'Fluoro
  misc_feature (10)..(10): 2'-O-methyl
  misc_feature (11)..(12): 2'-deoxy-2'Fluoro
  misc_feature (13)..(13): 2'-O-methyl
  misc_feature (14)..(17): 2'-deoxy-2'Fluoro
  misc_feature (18)..(19): 2'-O-methyl
  misc_feature (20)..(20): Phosphorothioate or Phosphorodithioate 3'-Internucleotide Linkage (optionally present)
  misc_feature (1). .(19): ribonucleotide unmodified or modified as described for this sequence
gagacggccgcugcucuggtt

SEQ ID NO: 1424 - RNA, 21 nt, Artificial Sequence
  Description of Artificial Sequence: Target Sequence/siNA antisense region (stab35)
  misc_feature (4)..(4): 2'-O-methyl
  misc_feature (5)..(5): 2'-deoxy-2'Fluoro
  misc_feature (6)..(7): 2'-O-methyl
  misc_feature (8)..(9): 2'-deoxy-2'Fluoro
  misc_feature (10)..(10): 2'-O-methyl
  misc_feature (11)..(12): 2'-deoxy-2'Fluoro
  misc_feature (13)..(13): 2'-O-methyl
  misc_feature (14)..(17): 2'-deoxy-2'Fluoro
  misc_feature (18)..(21): 2'-O-methyl
gagacggccgcugcucugguu

SEQ ID NO: 1425 - RNA, 21 nt, Artificial Sequence
  Description of Artificial Sequence: Target Sequence/siNA antisense region (stab36)
  misc_feature (4)..(4): 2'-O-methyl
  misc_feature (5)..(5): 2'-deoxy-2'Fluoro
  misc_feature (6)..(7): 2'-O-methyl
  misc_feature (8)..(9): 2'-deoxy-2'Fluoro
  misc_feature (10)..(10): 2'-O-methyl
  misc_feature (11)..(12): 2'-deoxy-2'Fluoro
  misc_feature (13)..(13): 2'-O-methyl
  misc_feature (14)..(17): 2'-deoxy-2'Fluoro
  misc_feature (18)..(21): 2'-O-methyl
gagacggccgcugcucuggcu

SEQ ID NO: 1426 - RNA, 19 nt, Artificial Sequence
  Description of Artificial Sequence: Target Sequence/siNA sense region
cugcacagccggggcaugc

SEQ ID NO: 1427 - RNA, 19 nt, Artificial Sequence
  Description of Artificial Sequence: Target Sequence/siNA antisense region
gcaugccccggcugugcag

SEQ ID NO: 1428 - DNA, 21 bp, Artificial Sequence
  Description of Artificial Sequence: Target Sequence/siNA sense region (stab00)
  misc_feature (1)..(19): ribonucleotide unmodified or modified as described for this sequence
cugcacagccggggcaugctt

SEQ ID NO: 1429 - DNA, 21 bp, Artificial Sequence
  Description of Artificial Sequence: Target Sequence/siNA antisense region (stab00as)
  misc_feature (1)..(19): ribonucleotide unmodified or modified as described for this sequence
gcaugccccggcugugcagtt

SEQ ID NO: 1430 - DNA, 21 bp, Artificial Sequence
  Description of Artificial Sequence: Target Sequence/siNA sense region (stab04)
  misc_feature (1)..(1): 5'-3 attached terminal deoxyabasic moiety, inverted abasic, inverted nucleotide or other terminal cap that is optionally present
  misc_feature (21)..(21): 3'-3 attached terminal deoxyabasic moiety, inverted abasic, inverted nucleotide or other terminal cap that is optionally present
  misc_feature (1)..(2): 2'-deoxy-2'Fluoro
  misc_feature (4)..(4): 2'-deoxy-2'Fluoro
  misc_feature (6)..(6): 2'-deoxy-2'Fluoro
  misc_feature (9)..(10): 2'-deoxy-2'Fluoro
  misc_feature (15)..(15): 2'-deoxy-2'Fluoro
  misc_feature (17)..(17): 2'-deoxy-2'Fluoro
  misc_feature (19)..(19): 2'-deoxy-2'Fluoro
  misc_feature (1). .(19): ribonucleotide unmodified or modified as described for this sequence
cugcacagccggggcaugctt

SEQ ID NO: 1431 - DNA, 21 bp, Artificial Sequence
  Description of Artificial Sequence: Target Sequence/siNA antisense region (stab05)
  misc_feature (2)..(2): 2'-deoxy-2'Fluoro
  misc_feature (4)..(4): 2'-deoxy-2'Fluoro
  misc_feature (6)..(9): 2'-deoxy-2'Fluoro
  misc_feature (12)..(13): 2'-deoxy-2'Fluoro
  misc_feature (15)..(15): 2'-deoxy-2'Fluoro
  misc_feature (17)..(17): 2'-deoxy-2'Fluoro
  misc_feature (20)..(20): Phosphorothioate or Phosphorodithioate 3'-Internucleotide Linkage (optionally present)
  misc_feature (1). .(19): ribonucleotide unmodified or modified as described for this sequence
gcaugccccggcugugcagtt

SEQ ID NO: 1432 - DNA, 21 bp, Artificial Sequence
  Description of Artificial Sequence: Target Sequence/siNA sense region (stab07)
  misc_feature (1)..(1): 5'-3 attached terminal deoxyabasic moiety, inverted abasic, inverted nucleotide or other terminal cap that is optionally present
  misc_feature (21)..(21): 3'-3 attached terminal deoxyabasic moiety, inverted abasic, inverted nucleotide or other terminal cap that is optionally present
  misc_feature (1)..(2): 2'-deoxy-2'Fluoro
  misc_feature (4)..(4): 2'-deoxy-2'Fluoro
  misc_feature (6)..(6): 2'-deoxy-2'Fluoro
  misc_feature (9)..(10): 2'-deoxy-2'Fluoro
  misc_feature (15)..(15): 2'-deoxy-2'Fluoro
  misc_feature (17)..(17): 2'-deoxy-2'Fluoro
  misc_feature (19)..(19): 2'-deoxy-2'Fluoro
cugcacagccggggcaugctt

SEQ ID NO: 1433 - DNA, 21 bp, Artificial Sequence
  Description of Artificial Sequence: Target Sequence/siNA antisense region (stab08)
  misc_feature (1)..(1): 2'-O-methyl
  misc_feature (2)..(2): 2'-deoxy-2'Fluoro
  misc_feature (3)..(3): 2'-O-methyl
  misc_feature (4)..(4): 2'-deoxy-2'Fluoro
  misc_feature (5)..(5): 2'-O-methyl
  misc_feature (6)..(9): 2'-deoxy-2'Fluoro
  misc_feature (10)..(11): 2'-O-methyl
  misc_feature (12)..(13): 2'-deoxy-2'Fluoro
  misc_feature (14)..(14): 2'-O-methyl
  misc_feature (15)..(15): 2'-deoxy-2'Fluoro
  misc_feature (16)..(16): 2'-O-methyl
  misc_feature (17)..(17): 2'-deoxy-2'Fluoro
  misc_feature (18)..(19): 2'-O-methyl
  misc_feature (20)..(20): Phosphorothioate or Phosphorodithioate 3'-Internucleotide Linkage (optionally present)
  misc_feature (1)..(19): ribonucleotide unmodified or modified as described for this sequence
gcaugccccggcugugcagtt

SEQ ID NO: 1434 - DNA, 21 bp, Artificial Sequence
  Description of Artificial Sequence: Target Sequence/siNA sense region (stab09)
  misc_feature (1)..(1): 5'-3 attached terminal deoxyabasic moiety, inverted abasic, inverted nucleotide or other terminal cap that is optionally present
  misc_feature (21)..(21): 3'-3 attached terminal deoxyabasic moiety, inverted abasic, inverted nucleotide or other terminal cap that is optionally present
cugcacagccggggcaugctt

SEQ ID NO: 1435 - DNA, 21 bp, Artificial Sequence
  Description of Artificial Sequence: Target Sequence/siNA antisense region (stab10)
  misc_feature (20)..(20): Phosphorothioate or Phosphorodithioate 3'-Internucleotide Linkage (optionally present)
gcaugccccggcugugcagtt

SEQ ID NO: 1436 - DNA, 21 bp, Artificial Sequence
  Description of Artificial Sequence: Target Sequence/siNA antisense region (stab19)
  misc_feature (21)..(21): 3'-3 attached terminal deoxyabasic moiety, inverted abasic, inverted nucleotide or other terminal cap that is optionally present
  misc_feature (1)..(1): 2'-O-methyl
  misc_feature (2)..(2): 2'-deoxy-2'Fluoro
  misc_feature (3)..(3): 2'-O-methyl
  misc_feature (4)..(4): 2'-deoxy-2'Fluoro
  misc_feature (5)..(5): 2'-O-methyl
  misc_feature (6)..(9): 2'-deoxy-2'Fluoro
  misc_feature (10)..(11): 2'-O-methyl
  misc_feature (12)..(13): 2'-deoxy-2'Fluoro
  misc_feature (14)..(14): 2'-O-methyl
  misc_feature (15)..(15): 2'-deoxy-2'Fluoro
  misc_feature (16)..(16): 2'-O-methyl
  misc_feature (17)..(17): 2'-deoxy-2'Fluoro
  misc_feature (18)..(19): 2'-O-methyl
  misc_feature (1)..(19): ribonucleotide unmodified or modified as described for this sequence
gcaugccccggcugugcagtt

SEQ ID NO: 1437 - DNA, 21 bp, Artificial Sequence
  Description of Artificial Sequence: Target Sequence/siNA antisense region (stab22)
  misc_feature (21)..(21): 3'-3 attached terminal deoxyabasic moiety, inverted abasic, inverted nucleotide or other terminal cap that is optionally present
  misc_feature (20)..(20): Phosphorothioate or Phosphorodithioate 3'-Internucleotide Linkage (optionally present)
gcaugccccggcugugcagtt

SEQ ID NO: 1438 - DNA, 21 bp, Artificial Sequence
  Description of Artificial Sequence: Target Sequence/siNA antisense region (stab25)
  misc_feature (4)..(4): 2'-deoxy-2'Fluoro
  misc_feature (5)..(5): 2'-O-methyl
  misc_feature (6)..(9): 2'-deoxy-2'Fluoro
  misc_feature (10)..(11): 2'-O-methyl
  misc_feature (12)..(13): 2'-deoxy-2'Fluoro
  misc_feature (14)..(14): 2'-O-methyl
  misc_feature (15)..(15): 2'-deoxy-2'Fluoro
  misc_feature (16)..(16): 2'-O-methyl
  misc_feature (17)..(17): 2'-deoxy-2'Fluoro
  misc_feature (18)..(19): 2'-O-methyl
  misc_feature (20)..(20): Phosphorothioate or Phosphorodithioate 3'-Internucleotide Linkage (optionally present)
  misc_feature (1). .(19): ribonucleotide unmodified or modified as described for this sequence
gcaugccccggcugugcagtt

SEQ ID NO: 1439 - RNA, 21 nt, Artificial Sequence
  Description of Artificial Sequence: Target Sequence/siNA antisense region (stab35)
  misc_feature (4)..(4): 2'-deoxy-2'Fluoro
  misc_feature (5)..(5): 2'-O-methyl
  misc_feature (6)..(9): 2'-deoxy-2'Fluoro
  misc_feature (10)..(11): 2'-O-methyl
  misc_feature (12)..(13): 2'-deoxy-2'Fluoro
  misc_feature (14)..(14): 2'-O-methyl
  misc_feature (15)..(15): 2'-deoxy-2'Fluoro
  misc_feature (16)..(16): 2'-O-methyl
  misc_feature (17)..(17): 2'-deoxy-2'Fluoro
  misc_feature (18)..(21): 2'-O-methyl
gcaugccccggcugugcaguu

SEQ ID NO: 1440 - RNA, 21 nt, Artificial Sequence
  Description of Artificial Sequence: Target Sequence/siNA antisense region (stab36)
  misc_feature (4)..(4): 2'-deoxy-2'Fluoro
  misc_feature (5)..(5): 2'-O-methyl
  misc_feature (6)..(9): 2'-deoxy-2'Fluoro
  misc_feature (10)..(11): 2'-O-methyl
  misc_feature (12)..(13): 2'-deoxy-2'Fluoro
  misc_feature (14)..(14): 2'-O-methyl
  misc_feature (15)..(15): 2'-deoxy-2'Fluoro
  misc_feature (16)..(16): 2'-O-methyl
  misc_feature (17)..(17): 2'-deoxy-2'Fluoro
  misc_feature (18)..(21): 2'-O-methyl
gcaugccccggcugugcagag

SEQ ID NO: 1441 - RNA, 19 nt, Artificial Sequence
  Description of Artificial Sequence: Target Sequence/siNA sense region
cuggaccgcucccgccugg

SEQ ID NO: 1442 - RNA, 19 nt, Artificial Sequence
  Description of Artificial Sequence: Target Sequence/siNA antisense region
ccaggcgggagcgguccag

SEQ ID NO: 1443 - DNA, 21 bp, Artificial Sequence
  Description of Artificial Sequence: Target Sequence/siNA sense region (stab00)
  misc_feature (1)..(19): ribonucleotide unmodified or modified as described for this sequence
cuggaccgcucccgccuggtt

SEQ ID NO: 1444 - DNA, 21 bp, Artificial Sequence
  Description of Artificial Sequence: Target Sequence/siNA antisense region (stab00as)
  misc_feature (1)..(19): ribonucleotide unmodified or modified as described for this sequence
ccaggcgggagcgguccagtt

SEQ ID NO: 1445 - DNA, 21 bp, Artificial Sequence
  Description of Artificial Sequence: Target Sequence/siNA sense region (stab04)
  misc_feature (1)..(1): 5'-3 attached terminal deoxyabasic moiety, inverted abasic, inverted nucleotide or other terminal cap that is optionally present
  misc_feature (21)..(21): 3'-3 attached terminal deoxyabasic moiety, inverted abasic, inverted nucleotide or other terminal cap that is optionally present
  misc_feature (1)..(2): 2'-deoxy-2'Fluoro
  misc_feature (6)..(7): 2'-deoxy-2'Fluoro
  misc_feature (9)..(13): 2'-deoxy-2'Fluoro
  misc_feature (15)..(17): 2'-deoxy-2'Fluoro
  misc_feature (1). .(19): ribonucleotide unmodified or modified as described for this sequence
cuggaccgcucccgccuggtt

SEQ ID NO: 1446 - DNA, 21 bp, Artificial Sequence
  Description of Artificial Sequence: Target Sequence/siNA antisense region (stab05)
  misc_feature (1)..(2): 2'-deoxy-2'Fluoro
  misc_feature (6)..(6): 2'-deoxy-2'Fluoro
  misc_feature (12)..(12): 2'-deoxy-2'Fluoro
  misc_feature (15)..(17): 2'-deoxy-2'Fluoro
  misc_feature (20)..(20): Phosphorothioate or Phosphorodithioate 3'-Internucleotide Linkage (optionally present)
  misc_feature (1). .(19): ribonucleotide unmodified or modified as described for this sequence
ccaggcgggagcgguccagtt

SEQ ID NO: 1447 - DNA, 21 bp, Artificial Sequence
  Description of Artificial Sequence: Target Sequence/siNA sense region (stab07)
  misc_feature (1)..(1): 5'-3 attached terminal deoxyabasic moiety, inverted abasic, inverted nucleotide or other terminal cap that is optionally present
  misc_feature (21)..(21): 3'-3 attached terminal deoxyabasic moiety, inverted abasic, inverted nucleotide or other terminal cap that is optionally present
  misc_feature (1)..(2): 2'-deoxy-2'Fluoro
  misc_feature (6)..(7): 2'-deoxy-2'Fluoro
  misc_feature (9)..(13): 2'-deoxy-2'Fluoro
  misc_feature (15)..(17): 2'-deoxy-2'Fluoro
  misc_feature (1)..(19): ribonucleotide unmodified or modified as described for this sequence
cuggaccgcucccgccuggtt

SEQ ID NO: 1448 - DNA, 21 bp, Artificial Sequence
  Description of Artificial Sequence: Target Sequence/siNA antisense region (stab08)
  misc_feature (1)..(2): 2'-deoxy-2'Fluoro
  misc_feature (3)..(5): 2'-O-methyl
  misc_feature (6)..(6): 2'-deoxy-2'Fluoro
  misc_feature (7)..(11): 2'-O-methyl
  misc_feature (12)..(12): 2'-deoxy-2'Fluoro
  misc_feature (13)..(14): 2'-O-methyl
  misc_feature (15)..(17): 2'-deoxy-2'Fluoro
  misc_feature (18)..(19): 2'-O-methyl
  misc_feature (20)..(20): Phosphorothioate or Phosphorodithioate 3'-Internucleotide Linkage (optionally present)
  misc_feature (1)..(19): ribonucleotide unmodified or modified as described for this sequence
ccaggcgggagcgguccagtt

SEQ ID NO: 1449 - DNA, 21 bp, Artificial Sequence
  Description of Artificial Sequence: Target Sequence/siNA sense region (stab09)
  misc_feature (1)..(1): 5'-3 attached terminal deoxyabasic moiety, inverted abasic, inverted nucleotide or other terminal cap that is optionally present
  misc_feature (21)..(21): 3'-3 attached terminal deoxyabasic moiety, inverted abasic, inverted nucleotide or other terminal cap that is optionally present
  misc_feature (1)..(19): ribonucleotide unmodified or modified as described for this sequence
cuggaccgcucccgccuggtt

SEQ ID NO: 1450 - DNA, 21 bp, Artificial Sequence
  Description of Artificial Sequence: Target Sequence/siNA antisense region (stab10)
  misc_feature (20)..(20): Phosphorothioate or Phosphorodithioate 3'-Internucleotide Linkage (optionally present)
  misc_feature (1)..(19): ribonucleotide unmodified or modified as described for this sequence
ccaggcgggagcgguccagtt

SEQ ID NO: 1451 - DNA, 21 bp, Artificial Sequence
  Description of Artificial Sequence: Target Sequence/siNA antisense region (stab19)
  misc_feature (21)..(21): 3'-3 attached terminal deoxyabasic moiety, inverted abasic, inverted nucleotide or other terminal cap that is optionally present
  misc_feature (1)..(2): 2'-deoxy-2'Fluoro
  misc_feature (3)..(5): 2'-O-methyl
  misc_feature (6)..(6): 2'-deoxy-2'Fluoro
  misc_feature (7)..(11): 2'-O-methyl
  misc_feature (12)..(12): 2'-deoxy-2'Fluoro
  misc_feature (13)..(14): 2'-O-methyl
  misc_feature (15)..(17): 2'-deoxy-2'Fluoro
  misc_feature (18)..(19): 2'-O-methyl
  misc_feature (1)..(19): ribonucleotide unmodified or modified as described for this sequence
ccaggcgggagcgguccagtt

SEQ ID NO: 1452 - DNA, 21 bp, Artificial Sequence
  Description of Artificial Sequence: Target Sequence/siNA antisense region (stab22)
  misc_feature (21)..(21): 3'-3 attached terminal deoxyabasic moiety, inverted abasic, inverted nucleotide or other terminal cap that is optionally present
  misc_feature (20)..(20): Phosphorothioate or Phosphorodithioate 3'-Internucleotide Linkage (optionally present)
  misc_feature (1)..(19): ribonucleotide unmodified or modified as described for this sequence
ccaggcgggagcgguccagtt

SEQ ID NO: 1453 - DNA, 21 bp, Artificial Sequence
  Description of Artificial Sequence: Target Sequence/siNA antisense region (stab25)
  misc_feature (4)..(5): 2'-O-methyl
  misc_feature (6)..(6): 2'-deoxy-2'Fluoro
  misc_feature (7)..(11): 2'-O-methyl
  misc_feature (12)..(12): 2'-deoxy-2'Fluoro
  misc_feature (13)..(14): 2'-O-methyl
  misc_feature (15)..(17): 2'-deoxy-2'Fluoro
  misc_feature (18)..(19): 2'-O-methyl
  misc_feature (20)..(20): Phosphorothioate or Phosphorodithioate 3'-Internucleotide Linkage (optionally present)
  misc_feature (1). .(19): ribonucleotide unmodified or modified as described for this sequence
ccaggcgggagcgguccagtt

SEQ ID NO: 1454 - RNA, 21 nt, Artificial Sequence
  Description of Artificial Sequence: Target Sequence/siNA antisense region (stab35)
  misc_feature (4)..(5): 2'-O-methyl
  misc_feature (6)..(6): 2'-deoxy-2'Fluoro
  misc_feature (7)..(11): 2'-O-methyl
  misc_feature (12)..(12): 2'-deoxy-2'Fluoro
  misc_feature (13)..(14): 2'-O-methyl
  misc_feature (15)..(17): 2'-deoxy-2'Fluoro
  misc_feature (18)..(21): 2'-O-methyl
ccaggcgggagcgguccaguu

SEQ ID NO: 1455 - RNA, 21 nt, Artificial Sequence
  Description of Artificial Sequence: Target Sequence/siNA antisense region (stab36)
  misc_feature (4)..(5): 2'-O-methyl
  misc_feature (6)..(6): 2'-deoxy-2'Fluoro
  misc_feature (7)..(11): 2'-O-methyl
  misc_feature (12)..(12): 2'-deoxy-2'Fluoro
  misc_feature (13)..(14): 2'-O-methyl
  misc_feature (15)..(17): 2'-deoxy-2'Fluoro
  misc_feature (18)..(21): 2'-O-methyl
ccaggcgggagcgguccagca

SEQ ID NO: 1456 - RNA, 19 nt, Artificial Sequence
  Description of Artificial Sequence: Target Sequence/siNA sense region
gcccugugcacgcucgucu

SEQ ID NO: 1457 - RNA, 19 nt, Artificial Sequence
  Description of Artificial Sequence: Target Sequence/siNA antisense region
agacgagcgugcacagggc

SEQ ID NO: 1458 - DNA, 21 bp, Artificial Sequence
  Description of Artificial Sequence: Target Sequence/siNA sense region (stab00)
  misc_feature (1)..(19): ribonucleotide unmodified or modified as described for this sequence
gcccugugcacgcucgucutt

SEQ ID NO: 1459 - DNA, 21 bp, Artificial Sequence
  Description of Artificial Sequence: Target Sequence/siNA antisense region (stab00as)
  misc_feature (1)..(19): ribonucleotide unmodified or modified as described for this sequence
agacgagcgugcacagggctt

SEQ ID NO: 1460 - DNA, 21 bp, Artificial Sequence
  Description of Artificial Sequence: Target Sequence/siNA sense region (stab04)
  misc_feature (1)..(1): 5'-3 attached terminal deoxyabasic moiety, inverted abasic, inverted nucleotide or other terminal cap that is optionally present
  misc_feature (21)..(21): 3'-3 attached terminal deoxyabasic moiety, inverted abasic, inverted nucleotide or other terminal cap that is optionally present
  misc_feature (2)..(5): 2'-deoxy-2'Fluoro
  misc_feature (7)..(7): 2'-deoxy-2'Fluoro
  misc_feature (9)..(9): 2'-deoxy-2'Fluoro
  misc_feature (11)..(11): 2'-deoxy-2'Fluoro
  misc_feature (13)..(15): 2'-deoxy-2'Fluoro
  misc_feature (17)..(19): 2'-deoxy-2'Fluoro
  misc_feature (1). .(19): ribonucleotide unmodified or modified as described for this sequence
gcccugugcacgcucgucutt

SEQ ID NO: 1461 - DNA, 21 bp, Artificial Sequence
  Description of Artificial Sequence: Target Sequence/siNA antisense region (stab05)
  misc_feature (4)..(4): 2'-deoxy-2'Fluoro
  misc_feature (8)..(8): 2'-deoxy-2'Fluoro
  misc_feature (10)..(10): 2'-deoxy-2'Fluoro
  misc_feature (12)..(12): 2'-deoxy-2'Fluoro
  misc_feature (14)..(14): 2'-deoxy-2'Fluoro
  misc_feature (19)..(19): 2'-deoxy-2'Fluoro
  misc_feature (20)..(20): Phosphorothioate or Phosphorodithioate 3'-Internucleotide Linkage (optionally present)
  misc_feature (1). .(19): ribonucleotide unmodified or modified as described for this sequence
agacgagcgugcacagggctt

SEQ ID NO: 1462 - DNA, 21 bp, Artificial Sequence
  Description of Artificial Sequence: Target Sequence/siNA sense region (stab07)
  misc_feature (1)..(1): 5'-3 attached terminal deoxyabasic moiety, inverted abasic, inverted nucleotide or other terminal cap that is optionally present
  misc_feature (21)..(21): 3'-3 attached terminal deoxyabasic moiety, inverted abasic, inverted nucleotide or other terminal cap that is optionally present
  misc_feature (2)..(5): 2'-deoxy-2'Fluoro
  misc_feature (7)..(7): 2'-deoxy-2'Fluoro
  misc_feature (9)..(9): 2'-deoxy-2'Fluoro
  misc_feature (11)..(11): 2'-deoxy-2'Fluoro
  misc_feature (13)..(15): 2'-deoxy-2'Fluoro
  misc_feature (17)..(19): 2'-deoxy-2'Fluoro
  misc_feature (1)..(19): ribonucleotide unmodified or modified as described for this sequence
gcccugugcacgcucgucutt

SEQ ID NO: 1463 - DNA, 21 bp, Artificial Sequence
  Description of Artificial Sequence: Target Sequence/siNA antisense region (stab08)
  misc_feature (1)..(3): 2'-O-methyl
  misc_feature (4)..(4): 2'-deoxy-2'Fluoro
  misc_feature (5)..(7): 2'-O-methyl
  misc_feature (8)..(8): 2'-deoxy-2'Fluoro
  misc_feature (9)..(9): 2'-O-methyl
  misc_feature (10)..(10): 2'-deoxy-2'Fluoro
  misc_feature (11)..(11): 2'-O-methyl
  misc_feature (12)..(12): 2'-deoxy-2'Fluoro
  misc_feature (13)..(13): 2'-O-methyl
  misc_feature (14)..(14): 2'-deoxy-2'Fluoro
  misc_feature (15)..(18): 2'-O-methyl
  misc_feature (19)..(19): 2'-deoxy-2'Fluoro
  misc_feature (20)..(20): Phosphorothioate or Phosphorodithioate 3'-Internucleotide Linkage (optionally present)
  misc_feature (1)..(19): ribonucleotide unmodified or modified as described for this sequence
agacgagcgugcacagggctt

SEQ ID NO: 1464 - DNA, 21 bp, Artificial Sequence
  Description of Artificial Sequence: Target Sequence/siNA sense region (stab09)
  misc_feature (1)..(1): 5'-3 attached terminal deoxyabasic moiety, inverted abasic, inverted nucleotide or other terminal cap that is optionally present
  misc_feature (21)..(21): 3'-3 attached terminal deoxyabasic moiety, inverted abasic, inverted nucleotide or other terminal cap that is optionally present
  misc_feature (1)..(19): ribonucleotide unmodified or modified as described for this sequence
gcccugugcacgcucgucutt

SEQ ID NO: 1465 - DNA, 21 bp, Artificial Sequence
  Description of Artificial Sequence: Target Sequence/siNA antisense region (stab10)
  misc_feature (20)..(20): Phosphorothioate or Phosphorodithioate 3'-Internucleotide Linkage (optionally present)
  misc_feature (1)..(19): ribonucleotide unmodified or modified as described for this sequence
agacgagcgugcacagggctt

SEQ ID NO: 1466 - DNA, 21 bp, Artificial Sequence
  Description of Artificial Sequence: Target Sequence/siNA antisense region (stab19)
  misc_feature (21)..(21): 3'-3 attached terminal deoxyabasic moiety, inverted abasic, inverted nucleotide or other terminal cap that is optionally present
  misc_feature (1)..(3): 2'-O-methyl
  misc_feature (4)..(4): 2'-deoxy-2'Fluoro
  misc_feature (5)..(7): 2'-O-methyl
  misc_feature (8)..(8): 2'-deoxy-2'Fluoro
  misc_feature (9)..(9): 2'-O-methyl
  misc_feature (10)..(10): 2'-deoxy-2'Fluoro
  misc_feature (11)..(11): 2'-O-methyl
  misc_feature (12)..(12): 2'-deoxy-2'Fluoro
  misc_feature (13)..(13): 2'-O-methyl
  misc_feature (14)..(14): 2'-deoxy-2'Fluoro
  misc_feature (15)..(18): 2'-O-methyl
  misc_feature (19)..(19): 2'-deoxy-2'Fluoro
  misc_feature (1)..(19): ribonucleotide unmodified or modified as described for this sequence
agacgagcgugcacagggctt

SEQ ID NO: 1467 - DNA, 21 bp, Artificial Sequence
  Description of Artificial Sequence: Target Sequence/siNA antisense region (stab22)
  misc_feature (21)..(21): 3'-3 attached terminal deoxyabasic moiety, inverted abasic, inverted nucleotide or other terminal cap that is optionally present
  misc_feature (20)..(20): Phosphorothioate or Phosphorodithioate 3'-Internucleotide Linkage (optionally present)
  misc_feature (1)..(19): ribonucleotide unmodified or modified as described for this sequence
agacgagcgugcacagggctt

SEQ ID NO: 1468 - DNA, 21 bp, Artificial Sequence
  Description of Artificial Sequence: Target Sequence/siNA antisense region (stab25)
  misc_feature (4)..(4): 2'-deoxy-2'Fluoro
  misc_feature (5)..(7): 2'-O-methyl
  misc_feature (8)..(8): 2'-deoxy-2'Fluoro
  misc_feature (9)..(9): 2'-O-methyl
  misc_feature (10)..(10): 2'-deoxy-2'Fluoro
  misc_feature (11)..(11): 2'-O-methyl
  misc_feature (12)..(12): 2'-deoxy-2'Fluoro
  misc_feature (13)..(13): 2'-O-methyl
  misc_feature (14)..(14): 2'-deoxy-2'Fluoro
  misc_feature (15)..(18): 2'-O-methyl
  misc_feature (19)..(19): 2'-deoxy-2'Fluoro
  misc_feature (20)..(20): Phosphorothioate or Phosphorodithioate 3'-Internucleotide Linkage (optionally present)
  misc_feature (1). .(19): ribonucleotide unmodified or modified as described for this sequence
agacgagcgugcacagggctt

SEQ ID NO: 1469 - RNA, 21 nt, Artificial Sequence
  Description of Artificial Sequence: Target Sequence/siNA antisense region (stab35)
  misc_feature (4)..(4): 2'-deoxy-2'Fluoro
  misc_feature (5)..(7): 2'-O-methyl
  misc_feature (8)..(8): 2'-deoxy-2'Fluoro
  misc_feature (9)..(9): 2'-O-methyl
  misc_feature (10)..(10): 2'-deoxy-2'Fluoro
  misc_feature (11)..(11): 2'-O-methyl
  misc_feature (12)..(12): 2'-deoxy-2'Fluoro
  misc_feature (13)..(13): 2'-O-methyl
  misc_feature (14)..(14): 2'-deoxy-2'Fluoro
  misc_feature (15)..(18): 2'-O-methyl
  misc_feature (19)..(19): 2'-deoxy-2'Fluoro
  misc_feature (20)..(21): 2'-O-methyl
agacgagcgugcacagggcuu

SEQ ID NO: 1470 - RNA, 21 nt, Artificial Sequence
  Description of Artificial Sequence: Target Sequence/siNA antisense region (stab36)
  misc_feature (4)..(4): 2'-deoxy-2'Fluoro
  misc_feature (5)..(7): 2'-O-methyl
  misc_feature (8)..(8): 2'-deoxy-2'Fluoro
  misc_feature (9)..(9): 2'-O-methyl
  misc_feature (10)..(10): 2'-deoxy-2'Fluoro
  misc_feature (11)..(11): 2'-O-methyl
  misc_feature (12)..(12): 2'-deoxy-2'Fluoro
  misc_feature (13)..(13): 2'-O-methyl
  misc_feature (14)..(14): 2'-deoxy-2'Fluoro
  misc_feature (15)..(18): 2'-O-methyl
  misc_feature (19)..(19): 2'-deoxy-2'Fluoro
  misc_feature (20)..(21): 2'-O-methyl
agacgagcgugcacagggcca

SEQ ID NO: 1471 - RNA, 19 nt, Artificial Sequence
  Description of Artificial Sequence: Target Sequence/siNA sense region
uuccucugccuguccugca

SEQ ID NO: 1472 - RNA, 19 nt, Artificial Sequence
  Description of Artificial Sequence: Target Sequence/siNA antisense region
ugcaggacaggcagaggaa

SEQ ID NO: 1473 - DNA, 21 bp, Artificial Sequence
  Description of Artificial Sequence: Target Sequence/siNA sense region (stab00)
  misc_feature (1)..(19): ribonucleotide unmodified or modified as described for this sequence
uuccucugccuguccugcatt

SEQ ID NO: 1474 - DNA, 21 bp, Artificial Sequence
  Description of Artificial Sequence: Target Sequence/siNA antisense region (stab00as)
  misc_feature (1)..(19): ribonucleotide unmodified or modified as described for this sequence
ugcaggacaggcagaggaatt

SEQ ID NO: 1475 - DNA, 21 bp, Artificial Sequence
  Description of Artificial Sequence: Target Sequence/siNA sense region (stab04)
  misc_feature (1)..(1): 5'-3 attached terminal deoxyabasic moiety, inverted abasic, inverted nucleotide or other terminal cap that is optionally present
  misc_feature (21)..(21): 3'-3 attached terminal deoxyabasic moiety, inverted abasic, inverted nucleotide or other terminal cap that is optionally present
  misc_feature (1)..(7): 2'-deoxy-2'Fluoro
  misc_feature (9)..(11): 2'-deoxy-2'Fluoro
  misc_feature (13)..(16): 2'-deoxy-2'Fluoro
  misc_feature (18)..(18): 2'-deoxy-2'Fluoro
  misc_feature (1). .(19): ribonucleotide unmodified or modified as described for this sequence
uuccucugccuguccugcatt

SEQ ID NO: 1476 - DNA, 21 bp, Artificial Sequence
  Description of Artificial Sequence: Target Sequence/siNA antisense region (stab05)
  misc_feature (1)..(1): 2'-deoxy-2'Fluoro
  misc_feature (3)..(3): 2'-deoxy-2'Fluoro
  misc_feature (8)..(8): 2'-deoxy-2'Fluoro
  misc_feature (12)..(12): 2'-deoxy-2'Fluoro
  misc_feature (20)..(20): Phosphorothioate or Phosphorodithioate 3'-Internucleotide Linkage (optionally present)
  misc_feature (1)..(19): ribonucleotide unmodified or modified as described for this sequence
ugcaggacaggcagaggaatt

SEQ ID NO: 1477 - DNA, 21 bp, Artificial Sequence
  Description of Artificial Sequence: Target Sequence/siNA sense region (stab07)
  misc_feature (1)..(1): 5'-3 attached terminal deoxyabasic moiety, inverted abasic, inverted nucleotide or other terminal cap that is optionally present
  misc_feature (21)..(21): 3'-3 attached terminal deoxyabasic moiety, inverted abasic, inverted nucleotide or other terminal cap that is optionally present
  misc_feature (1)..(7): 2'-deoxy-2'Fluoro
  misc_feature (9)..(11): 2'-deoxy-2'Fluoro
  misc_feature (13)..(16): 2'-deoxy-2'Fluoro
  misc_feature (18)..(18): 2'-deoxy-2'Fluoro
  misc_feature (1)..(19): ribonucleotide unmodified or modified as described for this sequence
uuccucugccuguccugcatt

SEQ ID NO: 1478 - DNA, 21 bp, Artificial Sequence
  Description of Artificial Sequence: Target Sequence/siNA antisense region (stab08)
  misc_feature (1)..(1): 2'-deoxy-2'Fluoro
  misc_feature (2)..(2): 2'-O-methyl
  misc_feature (3)..(3): 2'-deoxy-2'Fluoro
  misc_feature (4)..(7): 2'-O-methyl
  misc_feature (8)..(8): 2'-deoxy-2'Fluoro
  misc_feature (9)..(11): 2'-O-methyl
  misc_feature (12)..(12): 2'-deoxy-2'Fluoro
  misc_feature (13)..(19): 2'-O-methyl
  misc_feature (20)..(20): Phosphorothioate or Phosphorodithioate 3'-Internucleotide Linkage (optionally present)
  misc_feature (1)..(19): ribonucleotide unmodified or modified as described for this sequence
ugcaggacaggcagaggaatt

SEQ ID NO: 1479 - DNA, 21 bp, Artificial Sequence
  Description of Artificial Sequence: Target Sequence/siNA sense region (stab09)
  misc_feature (1)..(1): 5'-3 attached terminal deoxyabasic moiety, inverted abasic, inverted nucleotide or other terminal cap that is optionally present
  misc_feature (21)..(21): 3'-3 attached terminal deoxyabasic moiety, inverted abasic, inverted nucleotide or other terminal cap that is optionally present
  misc_feature (1)..(19): ribonucleotide unmodified or modified as described for this sequence
uuccucugccuguccugcatt

SEQ ID NO: 1480 - DNA, 21 bp, Artificial Sequence
  Description of Artificial Sequence: Target Sequence/siNA antisense region (stab10)
  misc_feature (20)..(20): Phosphorothioate or Phosphorodithioate 3'-Internucleotide Linkage (optionally present)
  misc_feature (1)..(19): ribonucleotide unmodified or modified as described for this sequence
ugcaggacaggcagaggaatt

SEQ ID NO: 1481 - DNA, 21 bp, Artificial Sequence
  Description of Artificial Sequence: Target Sequence/siNA antisense region (stab19)
  misc_feature (21)..(21): 3'-3 attached terminal deoxyabasic moiety, inverted abasic, inverted nucleotide or other terminal cap that is optionally present
  misc_feature (1)..(1): 2'-deoxy-2'Fluoro
  misc_feature (2)..(2): 2'-O-methyl
  misc_feature (3)..(3): 2'-deoxy-2'Fluoro
  misc_feature (4)..(7): 2'-O-methyl
  misc_feature (8)..(8): 2'-deoxy-2'Fluoro
  misc_feature (9)..(11): 2'-O-methyl
  misc_feature (12)..(12): 2'-deoxy-2'Fluoro
  misc_feature (13)..(19): 2'-O-methyl
  misc_feature (1)..(19): ribonucleotide unmodified or modified as described for this sequence
ugcaggacaggcagaggaatt

SEQ ID NO: 1482 - DNA, 21 bp, Artificial Sequence
  Description of Artificial Sequence: Target Sequence/siNA antisense region (stab22)
  misc_feature (21)..(21): 3'-3 attached terminal deoxyabasic moiety, inverted abasic, inverted nucleotide or other terminal cap that is optionally present
  misc_feature (20)..(20): Phosphorothioate or Phosphorodithioate 3'-Internucleotide Linkage (optionally present)
  misc_feature (1)..(19): ribonucleotide unmodified or modified as described for this sequence
ugcaggacaggcagaggaatt

SEQ ID NO: 1483 - DNA, 21 bp, Artificial Sequence
  Description of Artificial Sequence: Target Sequence/siNA antisense region (stab25)
  misc_feature (4)..(7): 2'-O-methyl
  misc_feature (8)..(8): 2'-deoxy-2'Fluoro
  misc_feature (9)..(11): 2'-O-methyl
  misc_feature (12)..(12): 2'-deoxy-2'Fluoro
  misc_feature (13)..(19): 2'-O-methyl
  misc_feature (20)..(20): Phosphorothioate or Phosphorodithioate 3'-Internucleotide Linkage (optionally present)
  misc_feature (1). .(19): ribonucleotide unmodified or modified as described for this sequence
ugcaggacaggcagaggaatt

SEQ ID NO: 1484 - RNA, 21 nt, Artificial Sequence
  Description of Artificial Sequence: Target Sequence/siNA antisense region (stab35)
  misc_feature (4)..(7): 2'-O-methyl
  misc_feature (8)..(8): 2'-deoxy-2'Fluoro
  misc_feature (9)..(11): 2'-O-methyl
  misc_feature (12)..(12): 2'-deoxy-2'Fluoro
  misc_feature (13)..(21): 2'-O-methyl
ugcaggacaggcagaggaauu

SEQ ID NO: 1485 - RNA, 21 nt, Artificial Sequence
  Description of Artificial Sequence: Target Sequence/siNA antisense region (stab36)
  misc_feature (4)..(7): 2'-O-methyl
  misc_feature (8)..(8): 2'-deoxy-2'Fluoro
  misc_feature (9)..(11): 2'-O-methyl
  misc_feature (12)..(12): 2'-deoxy-2'Fluoro
  misc_feature (13)..(21): 2'-O-methyl
ugcaggacaggcagaggaaga

SEQ ID NO: 1486 - RNA, 19 nt, Artificial Sequence
  Description of Artificial Sequence: Target Sequence/siNA sense region
aaccccuuggccuccuugc

SEQ ID NO: 1487 - RNA, 19 nt, Artificial Sequence
  Description of Artificial Sequence: Target Sequence/siNA antisense region
gcaaggaggccaagggguu

SEQ ID NO: 1488 - DNA, 21 bp, Artificial Sequence
  Description of Artificial Sequence: Target Sequence/siNA sense region (stab00)
  misc_feature (1)..(19): ribonucleotide unmodified or modified as described for this sequence
aaccccuuggccuccuugctt

SEQ ID NO: 1489 - DNA, 21 bp, Artificial Sequence
  Description of Artificial Sequence: Target Sequence/siNA antisense region (stab00as)
  misc_feature (1)..(19): ribonucleotide unmodified or modified as described for this sequence
gcaaggaggccaagggguutt

SEQ ID NO: 1490 - DNA, 21 bp, Artificial Sequence
  Description of Artificial Sequence: Target Sequence/siNA sense region (stab04)
  misc_feature (1)..(1): 5'-3 attached terminal deoxyabasic moiety, inverted abasic, inverted nucleotide or other terminal cap that is optionally present
  misc_feature (21)..(21): 3'-3 attached terminal deoxyabasic moiety, inverted abasic, inverted nucleotide or other terminal cap that is optionally present
  misc_feature (3)..(8): 2'-deoxy-2'Fluoro
  misc_feature (11)..(17): 2'-deoxy-2'Fluoro
  misc_feature (19)..(19): 2'-deoxy-2'Fluoro
  misc_feature (1). .(19): ribonucleotide unmodified or modified as described for this sequence
aaccccuuggccuccuugctt

SEQ ID NO: 1491 - DNA, 21 bp, Artificial Sequence
  Description of Artificial Sequence: Target Sequence/siNA antisense region (stab05)
  misc_feature (2)..(2): 2'-deoxy-2'Fluoro
  misc_feature (10)..(11): 2'-deoxy-2'Fluoro
  misc_feature (18)..(19): 2'-deoxy-2'Fluoro
  misc_feature (20)..(20): Phosphorothioate or Phosphorodithioate 3'-Internucleotide Linkage (optionally present)
  misc_feature (1). .(19): ribonucleotide unmodified or modified as described for this sequence
gcaaggaggccaagggguutt

SEQ ID NO: 1492 - DNA, 21 bp, Artificial Sequence
  Description of Artificial Sequence: Target Sequence/siNA sense region (stab07)
  misc_feature (1)..(1): 5'-3 attached terminal deoxyabasic moiety, inverted abasic, inverted nucleotide or other terminal cap that is optionally present
  misc_feature (21)..(21): 3'-3 attached terminal deoxyabasic moiety, inverted abasic, inverted nucleotide or other terminal cap that is optionally present
  misc_feature (3)..(8): 2'-deoxy-2'Fluoro
  misc_feature (11)..(17): 2'-deoxy-2'Fluoro
  misc_feature (19)..(19): 2'-deoxy-2'Fluoro
  misc_feature (1)..(19): ribonucleotide unmodified or modified as described for this sequence
aaccccuuggccuccuugctt

SEQ ID NO: 1493 - DNA, 21 bp, Artificial Sequence
  Description of Artificial Sequence: Target Sequence/siNA antisense region (stab08)
  misc_feature (1)..(1): 2'-O-methyl
  misc_feature (2)..(2): 2'-deoxy-2'Fluoro
  misc_feature (3)..(9): 2'-O-methyl
  misc_feature (10)..(11): 2'-deoxy-2'Fluoro
  misc_feature (12)..(17): 2'-O-methyl
  misc_feature (18)..(19): 2'-deoxy-2'Fluoro
  misc_feature (20)..(20): Phosphorothioate or Phosphorodithioate 3'-Internucleotide Linkage (optionally present)
  misc_feature (1)..(19): ribonucleotide unmodified or modified as described for this sequence
gcaaggaggccaagggguutt

SEQ ID NO: 1494 - DNA, 21 bp, Artificial Sequence
  Description of Artificial Sequence: Target Sequence/siNA sense region (stab09)
  misc_feature (1)..(1): 5'-3 attached terminal deoxyabasic moiety, inverted abasic, inverted nucleotide or other terminal cap that is optionally present
  misc_feature (21)..(21): 3'-3 attached terminal deoxyabasic moiety, inverted abasic, inverted nucleotide or other terminal cap that is optionally present
  misc_feature (1)..(19): ribonucleotide unmodified or modified as described for this sequence
aaccccuuggccuccuugctt

SEQ ID NO: 1495 - DNA, 21 bp, Artificial Sequence
  Description of Artificial Sequence: Target Sequence/siNA antisense region (stab10)
  misc_feature (20)..(20): Phosphorothioate or Phosphorodithioate 3'-Internucleotide Linkage (optionally present)
  misc_feature (1)..(19): ribonucleotide unmodified or modified as described for this sequence
gcaaggaggccaagggguutt

SEQ ID NO: 1496 - DNA, 21 bp, Artificial Sequence
  Description of Artificial Sequence: Target Sequence/siNA antisense region (stab19)
  misc_feature (21)..(21): 3'-3 attached terminal deoxyabasic moiety, inverted abasic, inverted nucleotide or other terminal cap that is optionally present
  misc_feature (1)..(1): 2'-O-methyl
  misc_feature (2)..(2): 2'-deoxy-2'Fluoro
  misc_feature (3)..(9): 2'-O-methyl
  misc_feature (10)..(11): 2'-deoxy-2'Fluoro
  misc_feature (12)..(17): 2'-O-methyl
  misc_feature (18)..(19): 2'-deoxy-2'Fluoro
  misc_feature (1)..(19): ribonucleotide unmodified or modified as described for this sequence
gcaaggaggccaagggguutt

SEQ ID NO: 1497 - DNA, 21 bp, Artificial Sequence
  Description of Artificial Sequence: Target Sequence/siNA antisense region (stab22)
  misc_feature (21)..(21): 3'-3 attached terminal deoxyabasic moiety, inverted abasic, inverted nucleotide or other terminal cap that is optionally present
  misc_feature (20)..(20): Phosphorothioate or Phosphorodithioate 3'-Internucleotide Linkage (optionally present)
  misc_feature (1)..(19): ribonucleotide unmodified or modified as described for this sequence
gcaaggaggccaagggguutt

SEQ ID NO: 1498 - DNA, 21 bp, Artificial Sequence
  Description of Artificial Sequence: Target Sequence/siNA antisense region (stab25)
  misc_feature (4)..(9): 2'-O-methyl
  misc_feature (10)..(11): 2'-deoxy-2'Fluoro
  misc_feature (12)..(17): 2'-O-methyl
  misc_feature (18)..(19): 2'-deoxy-2'Fluoro
  misc_feature (20)..(20): Phosphorothioate or Phosphorodithioate 3'-Internucleotide Linkage (optionally present)
  misc_feature (1). .(19): ribonucleotide unmodified or modified as described for this sequence
gcaaggaggccaagggguutt

SEQ ID NO: 1499 - RNA, 21 nt, Artificial Sequence
  Description of Artificial Sequence: Target Sequence/siNA antisense region (stab35)
  misc_feature (4)..(9): 2'-O-methyl
  misc_feature (10)..(11): 2'-deoxy-2'Fluoro
  misc_feature (12)..(17): 2'-O-methyl
  misc_feature (18)..(19): 2'-deoxy-2'Fluoro
  misc_feature (20)..(21): 2'-O-methyl
gcaaggaggccaagggguuuu

SEQ ID NO: 1500 - RNA, 21 nt, Artificial Sequence
  Description of Artificial Sequence: Target Sequence/siNA antisense region (stab36)
  misc_feature (4)..(9): 2'-O-methyl
  misc_feature (10)..(11): 2'-deoxy-2'Fluoro
  misc_feature (12)..(17): 2'-O-methyl
  misc_feature (18)..(19): 2'-deoxy-2'Fluoro
  misc_feature (20)..(21): 2'-O-methyl
gcaaggaggccaagggguugc

SEQ ID NO: 1501 - RNA, 19 nt, Artificial Sequence
  Description of Artificial Sequence: Target Sequence/siNA sense region
cugggggcccgggggcuuc

SEQ ID NO: 1502 - RNA, 19 nt, Artificial Sequence
  Description of Artificial Sequence: Target Sequence/siNA antisense region
gaagcccccgggcccccag

SEQ ID NO: 1503 - DNA, 21 bp, Artificial Sequence
  Description of Artificial Sequence: Target Sequence/siNA sense region (stab00)
  misc_feature (1)..(19): ribonucleotide unmodified or modified as described for this sequence
cugggggcccgggggcuuctt

SEQ ID NO: 1504 - DNA, 21 bp, Artificial Sequence
  Description of Artificial Sequence: Target Sequence/siNA antisense region (stab00as)
  misc_feature (1)..(19): ribonucleotide unmodified or modified as described for this sequence
gaagcccccgggcccccagtt

SEQ ID NO: 1505 - DNA, 21 bp, Artificial Sequence
  Description of Artificial Sequence: Target Sequence/siNA sense region (stab04)
  misc_feature (1)..(1): 5'-3 attached terminal deoxyabasic moiety, inverted abasic, inverted nucleotide or other terminal cap that is optionally present
  misc_feature (21)..(21): 3'-3 attached terminal deoxyabasic moiety, inverted abasic, inverted nucleotide or other terminal cap that is optionally present
  misc_feature (1)..(2): 2'-deoxy-2'Fluoro
  misc_feature (8)..(10): 2'-deoxy-2'Fluoro
  misc_feature (16)..(19): 2'-deoxy-2'Fluoro
  misc_feature (1). .(19): ribonucleotide unmodified or modified as described for this sequence
cugggggcccgggggcuuctt

SEQ ID NO: 1506 - DNA, 21 bp, Artificial Sequence
  Description of Artificial Sequence: Target Sequence/siNA antisense region (stab05)
  misc_feature (5)..(9): 2'-deoxy-2'Fluoro
  misc_feature (13)..(17): 2'-deoxy-2'Fluoro
  misc_feature (20)..(20): Phosphorothioate or Phosphorodithioate 3'-Internucleotide Linkage (optionally present)
  misc_feature (1). .(19): ribonucleotide unmodified or modified as described for this sequence
gaagcccccgggcccccagtt

SEQ ID NO: 1507 - DNA, 21 bp, Artificial Sequence
  Description of Artificial Sequence: Target Sequence/siNA sense region (stab07)
  misc_feature (1)..(1): 5'-3 attached terminal deoxyabasic moiety, inverted abasic, inverted nucleotide or other terminal cap that is optionally present
  misc_feature (21)..(21): 3'-3 attached terminal deoxyabasic moiety, inverted abasic, inverted nucleotide or other terminal cap that is optionally present
  misc_feature (1)..(2): 2'-deoxy-2'Fluoro
  misc_feature (8)..(10): 2'-deoxy-2'Fluoro
  misc_feature (16)..(19): 2'-deoxy-2'Fluoro
  misc_feature (1)..(19): ribonucleotide unmodified or modified as described for this sequence
cugggggcccgggggcuuctt

SEQ ID NO: 1508 - DNA, 21 bp, Artificial Sequence
  Description of Artificial Sequence: Target Sequence/siNA antisense region (stab08)
  misc_feature (1)..(4): 2'-O-methyl
  misc_feature (5)..(9): 2'-deoxy-2'Fluoro
  misc_feature (10)..(12): 2'-O-methyl
  misc_feature (13)..(17): 2'-deoxy-2'Fluoro
  misc_feature (18)..(19): 2'-O-methyl
  misc_feature (20)..(20): Phosphorothioate or Phosphorodithioate 3'-Internucleotide Linkage (optionally present)
  misc_feature (1)..(19): ribonucleotide unmodified or modified as described for this sequence
gaagcccccgggcccccagtt

SEQ ID NO: 1509 - DNA, 21 bp, Artificial Sequence
  Description of Artificial Sequence: Target Sequence/siNA sense region (stab09)
  misc_feature (1)..(1): 5'-3 attached terminal deoxyabasic moiety, inverted abasic, inverted nucleotide or other terminal cap that is optionally present
  misc_feature (21)..(21): 3'-3 attached terminal deoxyabasic moiety, inverted abasic, inverted nucleotide or other terminal cap that is optionally present
  misc_feature (1)..(19): ribonucleotide unmodified or modified as described for this sequence
cugggggcccgggggcuuctt

SEQ ID NO: 1510 - DNA, 21 bp, Artificial Sequence
  Description of Artificial Sequence: Target Sequence/siNA antisense region (stab10)
  misc_feature (20)..(20): Phosphorothioate or Phosphorodithioate 3'-Internucleotide Linkage (optionally present)
  misc_feature (1)..(19): ribonucleotide unmodified or modified as described for this sequence
gaagcccccgggcccccagtt

SEQ ID NO: 1511 - DNA, 21 bp, Artificial Sequence
  Description of Artificial Sequence: Target Sequence/siNA antisense region (stab19)
  misc_feature (21)..(21): 3'-3 attached terminal deoxyabasic moiety, inverted abasic, inverted nucleotide or other terminal cap that is optionally present
  misc_feature (1)..(4): 2'-O-methyl
  misc_feature (5)..(9): 2'-deoxy-2'Fluoro
  misc_feature (10)..(12): 2'-O-methyl
  misc_feature (13)..(17): 2'-deoxy-2'Fluoro
  misc_feature (18)..(19): 2'-O-methyl
  misc_feature (1)..(19): ribonucleotide unmodified or modified as described for this sequence
gaagcccccgggcccccagtt

SEQ ID NO: 1512 - DNA, 21 bp, Artificial Sequence
  Description of Artificial Sequence: Target Sequence/siNA antisense region (stab22)
  misc_feature (21)..(21): 3'-3 attached terminal deoxyabasic moiety, inverted abasic, inverted nucleotide or other terminal cap that is optionally present
  misc_feature (20)..(20): Phosphorothioate or Phosphorodithioate 3'-Internucleotide Linkage (optionally present)
  misc_feature (1)..(19): ribonucleotide unmodified or modified as described for this sequence
gaagcccccgggcccccagtt

SEQ ID NO: 1513 - DNA, 21 bp, Artificial Sequence
  Description of Artificial Sequence: Target Sequence/siNA antisense region (stab25)
  misc_feature (4)..(4): 2'-O-methyl
  misc_feature (5)..(9): 2'-deoxy-2'Fluoro
  misc_feature (10)..(12): 2'-O-methyl
  misc_feature (13)..(17): 2'-deoxy-2'Fluoro
  misc_feature (18)..(19): 2'-O-methyl
  misc_feature (20)..(20): Phosphorothioate or Phosphorodithioate 3'-Internucleotide Linkage (optionally present)
  misc_feature (1). .(19): ribonucleotide unmodified or modified as described for this sequence
gaagcccccgggcccccagtt

SEQ ID NO: 1514 - RNA, 21 nt, Artificial Sequence
  Description of Artificial Sequence: Target Sequence/siNA antisense region (stab35)
  misc_feature (4)..(4): 2'-O-methyl
  misc_feature (5)..(9): 2'-deoxy-2'Fluoro
  misc_feature (10)..(12): 2'-O-methyl
  misc_feature (13)..(17): 2'-deoxy-2'Fluoro
  misc_feature (18)..(21): 2'-O-methyl
gaagcccccgggcccccaguu

SEQ ID NO: 1515 - RNA, 21 nt, Artificial Sequence
  Description of Artificial Sequence: Target Sequence/siNA antisense region (stab36)
  misc_feature (4)..(4): 2'-O-methyl
  misc_feature (5)..(9): 2'-deoxy-2'Fluoro
  misc_feature (10)..(12): 2'-O-methyl
  misc_feature (13)..(17): 2'-deoxy-2'Fluoro
  misc_feature (18)..(21): 2'-O-methyl
gaagcccccgggcccccagca

SEQ ID NO: 1516 - RNA, 19 nt, Artificial Sequence
  Description of Artificial Sequence: Target Sequence/siNA sense region
cccagccccucagauacca

SEQ ID NO: 1517 - RNA, 19 nt, Artificial Sequence
  Description of Artificial Sequence: Target Sequence/siNA antisense region
ugguaucugaggggcuggg

SEQ ID NO: 1518 - DNA, 21 bp, Artificial Sequence
  Description of Artificial Sequence: Target Sequence/siNA sense region (stab00)
  misc_feature (1)..(19): ribonucleotide unmodified or modified as described for this sequence
cccagccccucagauaccatt

SEQ ID NO: 1519 - DNA, 21 bp, Artificial Sequence
  Description of Artificial Sequence: Target Sequence/siNA antisense region (stab00as)
  misc_feature (1)..(19): ribonucleotide unmodified or modified as described for this sequence
ugguaucugaggggcugggtt

SEQ ID NO: 1520 - DNA, 21 bp, Artificial Sequence
  Description of Artificial Sequence: Target Sequence/siNA sense region (stab04)
  misc_feature (1)..(1): 5'-3 attached terminal deoxyabasic moiety, inverted abasic, inverted nucleotide or other terminal cap that is optionally present
  misc_feature (21)..(21): 3'-3 attached terminal deoxyabasic moiety, inverted abasic, inverted nucleotide or other terminal cap that is optionally present
  misc_feature (1)..(3): 2'-deoxy-2'Fluoro
  misc_feature (6)..(11): 2'-deoxy-2'Fluoro
  misc_feature (15)..(15): 2'-deoxy-2'Fluoro
  misc_feature (17)..(18): 2'-deoxy-2'Fluoro
  misc_feature (1). .(19): ribonucleotide unmodified or modified as described for this sequence
cccagccccucagauaccatt

SEQ ID NO: 1521 - DNA, 21 bp, Artificial Sequence
  Description of Artificial Sequence: Target Sequence/siNA antisense region (stab05)
  misc_feature (1)..(1): 2'-deoxy-2'Fluoro
  misc_feature (4)..(4): 2'-deoxy-2'Fluoro
  misc_feature (6)..(8): 2'-deoxy-2'Fluoro
  misc_feature (15)..(16): 2'-deoxy-2'Fluoro
  misc_feature (20)..(20): Phosphorothioate or Phosphorodithioate 3'-Internucleotide Linkage (optionally present)
  misc_feature (1). .(19): ribonucleotide unmodified or modified as described for this sequence
ugguaucugaggggcugggtt

SEQ ID NO: 1522 - DNA, 21 bp, Artificial Sequence
  Description of Artificial Sequence: Target Sequence/siNA sense region (stab07)
  misc_feature (1)..(1): 5'-3 attached terminal deoxyabasic moiety, inverted abasic, inverted nucleotide or other terminal cap that is optionally present
  misc_feature (21)..(21): 3'-3 attached terminal deoxyabasic moiety, inverted abasic, inverted nucleotide or other terminal cap that is optionally present
  misc_feature (1)..(3): 2'-deoxy-2'Fluoro
  misc_feature (6)..(11): 2'-deoxy-2'Fluoro
  misc_feature (15)..(15): 2'-deoxy-2'Fluoro
  misc_feature (17)..(18): 2'-deoxy-2'Fluoro
  misc_feature (1)..(19): ribonucleotide unmodified or modified as described for this sequence
cccagccccucagauaccatt

SEQ ID NO: 1523 - DNA, 21 bp, Artificial Sequence
  Description of Artificial Sequence: Target Sequence/siNA antisense region (stab08)
  misc_feature (1)..(1): 2'-deoxy-2'Fluoro
  misc_feature (2)..(3): 2'-O-methyl
  misc_feature (4)..(4): 2'-deoxy-2'Fluoro
  misc_feature (5)..(5): 2'-O-methyl
  misc_feature (6)..(8): 2'-deoxy-2'Fluoro
  misc_feature (9)..(14): 2'-O-methyl
  misc_feature (15)..(16): 2'-deoxy-2'Fluoro
  misc_feature (17)..(19): 2'-O-methyl
  misc_feature (20)..(20): Phosphorothioate or Phosphorodithioate 3'-Internucleotide Linkage (optionally present)
  misc_feature (1)..(19): ribonucleotide unmodified or modified as described for this sequence
ugguaucugaggggcugggtt

SEQ ID NO: 1524 - DNA, 21 bp, Artificial Sequence
  Description of Artificial Sequence: Target Sequence/siNA sense region (stab09)
  misc_feature (1)..(1): 5'-3 attached terminal deoxyabasic moiety, inverted abasic, inverted nucleotide or other terminal cap that is optionally present
  misc_feature (21)..(21): 3'-3 attached terminal deoxyabasic moiety, inverted abasic, inverted nucleotide or other terminal cap that is optionally present
  misc_feature (1)..(19): ribonucleotide unmodified or modified as described for this sequence
cccagccccucagauaccatt

SEQ ID NO: 1525 - DNA, 21 bp, Artificial Sequence
  Description of Artificial Sequence: Target Sequence/siNA antisense region (stab10)
  misc_feature (20)..(20): Phosphorothioate or Phosphorodithioate 3'-Internucleotide Linkage (optionally present)
  misc_feature (1)..(19): ribonucleotide unmodified or modified as described for this sequence
ugguaucugaggggcugggtt

SEQ ID NO: 1526 - DNA, 21 bp, Artificial Sequence
  Description of Artificial Sequence: Target Sequence/siNA antisense region (stab19)
  misc_feature (21)..(21): 3'-3 attached terminal deoxyabasic moiety, inverted abasic, inverted nucleotide or other terminal cap that is optionally present
  misc_feature (1)..(1): 2'-deoxy-2'Fluoro
  misc_feature (2)..(3): 2'-O-methyl
  misc_feature (4)..(4): 2'-deoxy-2'Fluoro
  misc_feature (5)..(5): 2'-O-methyl
  misc_feature (6)..(8): 2'-deoxy-2'Fluoro
  misc_feature (9)..(14): 2'-O-methyl
  misc_feature (15)..(16): 2'-deoxy-2'Fluoro
  misc_feature (17)..(19): 2'-O-methyl
  misc_feature (1)..(19): ribonucleotide unmodified or modified as described for this sequence
ugguaucugaggggcugggtt

SEQ ID NO: 1527 - DNA, 21 bp, Artificial Sequence
  Description of Artificial Sequence: Target Sequence/siNA antisense region (stab22)
  misc_feature (21)..(21): 3'-3 attached terminal deoxyabasic moiety, inverted abasic, inverted nucleotide or other terminal cap that is optionally present
  misc_feature (20)..(20): Phosphorothioate or Phosphorodithioate 3'-Internucleotide Linkage (optionally present)
  misc_feature (1)..(19): ribonucleotide unmodified or modified as described for this sequence
ugguaucugaggggcugggtt

SEQ ID NO: 1528 - DNA, 21 bp, Artificial Sequence
  Description of Artificial Sequence: Target Sequence/siNA antisense region (stab25)
  misc_feature (4)..(4): 2'-deoxy-2'Fluoro
  misc_feature (5)..(5): 2'-O-methyl
  misc_feature (6)..(8): 2'-deoxy-2'Fluoro
  misc_feature (9)..(14): 2'-O-methyl
  misc_feature (15)..(16): 2'-deoxy-2'Fluoro
  misc_feature (17)..(19): 2'-O-methyl
  misc_feature (20)..(20): Phosphorothioate or Phosphorodithioate 3'-Internucleotide Linkage (optionally present)
  misc_feature (1). .(19): ribonucleotide unmodified or modified as described for this sequence
ugguaucugaggggcugggtt

SEQ ID NO: 1529 - RNA, 21 nt, Artificial Sequence
  Description of Artificial Sequence: Target Sequence/siNA antisense region (stab35)
  misc_feature (4)..(4): 2'-deoxy-2'Fluoro
  misc_feature (5)..(5): 2'-O-methyl
  misc_feature (6)..(8): 2'-deoxy-2'Fluoro
  misc_feature (9)..(14): 2'-O-methyl
  misc_feature (15)..(16): 2'-deoxy-2'Fluoro
  misc_feature (17)..(21): 2'-O-methyl
ugguaucugaggggcuggguu

SEQ ID NO: 1530 - RNA, 21 nt, Artificial Sequence
  Description of Artificial Sequence: Target Sequence/siNA antisense region (stab36)
  misc_feature (4)..(4): 2'-deoxy-2'Fluoro
  misc_feature (5)..(5): 2'-O-methyl
  misc_feature (6)..(8): 2'-deoxy-2'Fluoro
  misc_feature (9)..(14): 2'-O-methyl
  misc_feature (15)..(16): 2'-deoxy-2'Fluoro
  misc_feature (17)..(21): 2'-O-methyl
ugguaucugaggggcugggaa

SEQ ID NO: 1531 - RNA, 19 nt, Artificial Sequence
  Description of Artificial Sequence: Target Sequence/siNA sense region
accagcgucuaccauagcc

SEQ ID NO: 1532 - RNA, 19 nt, Artificial Sequence
  Description of Artificial Sequence: Target Sequence/siNA antisense region
ggcuaugguagacgcuggu

SEQ ID NO: 1533 - DNA, 21 bp, Artificial Sequence
  Description of Artificial Sequence: Target Sequence/siNA sense region (stab00)
  misc_feature (1)..(19): ribonucleotide unmodified or modified as described for this sequence
accagcgucuaccauagcctt

SEQ ID NO: 1534 - DNA, 21 bp, Artificial Sequence
  Description of Artificial Sequence: Target Sequence/siNA antisense region (stab00as)
  misc_feature (1)..(19): ribonucleotide unmodified or modified as described for this sequence
ggcuaugguagacgcuggutt

SEQ ID NO: 1535 - DNA, 21 bp, Artificial Sequence
  Description of Artificial Sequence: Target Sequence/siNA sense region (stab04)
  misc_feature (1)..(1): 5'-3 attached terminal deoxyabasic moiety, inverted abasic, inverted nucleotide or other terminal cap that is optionally present
  misc_feature (21)..(21): 3'-3 attached terminal deoxyabasic moiety, inverted abasic, inverted nucleotide or other terminal cap that is optionally present
  misc_feature (2)..(3): 2'-deoxy-2'Fluoro
  misc_feature (6)..(6): 2'-deoxy-2'Fluoro
  misc_feature (8)..(10): 2'-deoxy-2'Fluoro
  misc_feature (12)..(13): 2'-deoxy-2'Fluoro
  misc_feature (15)..(15): 2'-deoxy-2'Fluoro
  misc_feature (18)..(19): 2'-deoxy-2'Fluoro
  misc_feature (1). .(19): ribonucleotide unmodified or modified as described for this sequence
accagcgucuaccauagcctt

SEQ ID NO: 1536 - DNA, 21 bp, Artificial Sequence
  Description of Artificial Sequence: Target Sequence/siNA antisense region (stab05)
  misc_feature (3)..(4): 2'-deoxy-2'Fluoro
  misc_feature (6)..(6): 2'-deoxy-2'Fluoro
  misc_feature (9)..(9): 2'-deoxy-2'Fluoro
  misc_feature (13)..(13): 2'-deoxy-2'Fluoro
  misc_feature (15)..(16): 2'-deoxy-2'Fluoro
  misc_feature (19)..(19): 2'-deoxy-2'Fluoro
  misc_feature (20)..(20): Phosphorothioate or Phosphorodithioate 3'-Internucleotide Linkage (optionally present)
  misc_feature (1). .(19): ribonucleotide unmodified or modified as described for this sequence
ggcuaugguagacgcuggutt

SEQ ID NO: 1537 - DNA, 21 bp, Artificial Sequence
  Description of Artificial Sequence: Target Sequence/siNA sense region (stab07)
  misc_feature (1)..(1): 5'-3 attached terminal deoxyabasic moiety, inverted abasic, inverted nucleotide or other terminal cap that is optionally present
  misc_feature (21)..(21): 3'-3 attached terminal deoxyabasic moiety, inverted abasic, inverted nucleotide or other terminal cap that is optionally present
  misc_feature (2)..(3): 2'-deoxy-2'Fluoro
  misc_feature (6)..(6): 2'-deoxy-2'Fluoro
  misc_feature (8)..(10): 2'-deoxy-2'Fluoro
  misc_feature (12)..(13): 2'-deoxy-2'Fluoro
  misc_feature (15)..(15): 2'-deoxy-2'Fluoro
  misc_feature (18)..(19): 2'-deoxy-2'Fluoro
  misc_feature (1)..(19): ribonucleotide unmodified or modified as described for this sequence
accagcgucuaccauagcctt

SEQ ID NO: 1538 - DNA, 21 bp, Artificial Sequence
  Description of Artificial Sequence: Target Sequence/siNA antisense region (stab08)
  misc_feature (1)..(2): 2'-O-methyl
  misc_feature (3)..(4): 2'-deoxy-2'Fluoro
  misc_feature (5)..(5): 2'-O-methyl
  misc_feature (6)..(6): 2'-deoxy-2'Fluoro
  misc_feature (7)..(8): 2'-O-methyl
  misc_feature (9)..(9): 2'-deoxy-2'Fluoro
  misc_feature (10)..(12): 2'-O-methyl
  misc_feature (13)..(13): 2'-deoxy-2'Fluoro
  misc_feature (14)..(14): 2'-O-methyl
  misc_feature (15)..(16): 2'-deoxy-2'Fluoro
  misc_feature (17)..(18): 2'-O-methyl
  misc_feature (19)..(19): 2'-deoxy-2'Fluoro
  misc_feature (20)..(20): Phosphorothioate or Phosphorodithioate 3'-Internucleotide Linkage (optionally present)
  misc_feature (1)..(19): ribonucleotide unmodified or modified as described for this sequence
ggcuaugguagacgcuggutt

SEQ ID NO: 1539 - DNA, 21 bp, Artificial Sequence
  Description of Artificial Sequence: Target Sequence/siNA sense region (stab09)
  misc_feature (1)..(1): 5'-3 attached terminal deoxyabasic moiety, inverted abasic, inverted nucleotide or other terminal cap that is optionally present
  misc_feature (21)..(21): 3'-3 attached terminal deoxyabasic moiety, inverted abasic, inverted nucleotide or other terminal cap that is optionally present
  misc_feature (1)..(19): ribonucleotide unmodified or modified as described for this sequence
accagcgucuaccauagcctt

SEQ ID NO: 1540 - DNA, 21 bp, Artificial Sequence
  Description of Artificial Sequence: Target Sequence/siNA antisense region (stab10)
  misc_feature (20)..(20): Phosphorothioate or Phosphorodithioate 3'-Internucleotide Linkage (optionally present)
  misc_feature (1)..(19): ribonucleotide unmodified or modified as described for this sequence
ggcuaugguagacgcuggutt

SEQ ID NO: 1541 - DNA, 21 bp, Artificial Sequence
  Description of Artificial Sequence: Target Sequence/siNA antisense region (stab19)
  misc_feature (21)..(21): 3'-3 attached terminal deoxyabasic moiety, inverted abasic, inverted nucleotide or other terminal cap that is optionally present
  misc_feature (1)..(2): 2'-O-methyl
  misc_feature (3)..(4): 2'-deoxy-2'Fluoro
  misc_feature (5)..(5): 2'-O-methyl
  misc_feature (6)..(6): 2'-deoxy-2'Fluoro
  misc_feature (7)..(8): 2'-O-methyl
  misc_feature (9)..(9): 2'-deoxy-2'Fluoro
  misc_feature (10)..(12): 2'-O-methyl
  misc_feature (13)..(13): 2'-deoxy-2'Fluoro
  misc_feature (14)..(14): 2'-O-methyl
  misc_feature (15)..(16): 2'-deoxy-2'Fluoro
  misc_feature (17)..(18): 2'-O-methyl
  misc_feature (19)..(19): 2'-deoxy-2'Fluoro
  misc_feature (1)..(19): ribonucleotide unmodified or modified as described for this sequence
ggcuaugguagacgcuggutt

SEQ ID NO: 1542 - DNA, 21 bp, Artificial Sequence
  Description of Artificial Sequence: Target Sequence/siNA antisense region (stab22)
  misc_feature (21)..(21): 3'-3 attached terminal deoxyabasic moiety, inverted abasic, inverted nucleotide or other terminal cap that is optionally present
  misc_feature (20)..(20): Phosphorothioate or Phosphorodithioate 3'-Internucleotide Linkage (optionally present)
  misc_feature (1)..(19): ribonucleotide unmodified or modified as described for this sequence
ggcuaugguagacgcuggutt

SEQ ID NO: 1543 - DNA, 21 bp, Artificial Sequence
  Description of Artificial Sequence: Target Sequence/siNA antisense region (stab25)
  misc_feature (4)..(4): 2'-deoxy-2'Fluoro
  misc_feature (5)..(5): 2'-O-methyl
  misc_feature (6)..(6): 2'-deoxy-2'Fluoro
  misc_feature (7)..(8): 2'-O-methyl
  misc_feature (9)..(9): 2'-deoxy-2'Fluoro
  misc_feature (10)..(12): 2'-O-methyl
  misc_feature (13)..(13): 2'-deoxy-2'Fluoro
  misc_feature (14)..(14): 2'-O-methyl
  misc_feature (15)..(16): 2'-deoxy-2'Fluoro
  misc_feature (17)..(18): 2'-O-methyl
  misc_feature (19)..(19): 2'-deoxy-2'Fluoro
  misc_feature (20)..(20): Phosphorothioate or Phosphorodithioate 3'-Internucleotide Linkage (optionally present)
  misc_feature (1). .(19): ribonucleotide unmodified or modified as described for this sequence
ggcuaugguagacgcuggutt

SEQ ID NO: 1544 - RNA, 21 nt, Artificial Sequence
  Description of Artificial Sequence: Target Sequence/siNA antisense region (stab35)
  misc_feature (4)..(4): 2'-deoxy-2'Fluoro
  misc_feature (5)..(5): 2'-O-methyl
  misc_feature (6)..(6): 2'-deoxy-2'Fluoro
  misc_feature (7)..(8): 2'-O-methyl
  misc_feature (9)..(9): 2'-deoxy-2'Fluoro
  misc_feature (10)..(12): 2'-O-methyl
  misc_feature (13)..(13): 2'-deoxy-2'Fluoro
  misc_feature (14)..(14): 2'-O-methyl
  misc_feature (15)..(16): 2'-deoxy-2'Fluoro
  misc_feature (17)..(18): 2'-O-methyl
  misc_feature (19)..(19): 2'-deoxy-2'Fluoro
  misc_feature (20)..(21): 2'-O-methyl
ggcuaugguagacgcugguuu

SEQ ID NO: 1545 - RNA, 21 nt, Artificial Sequence
  Description of Artificial Sequence: Target Sequence/siNA antisense region (stab36)
  misc_feature (4)..(4): 2'-deoxy-2'Fluoro
  misc_feature (5)..(5): 2'-O-methyl
  misc_feature (6)..(6): 2'-deoxy-2'Fluoro
  misc_feature (7)..(8): 2'-O-methyl
  misc_feature (9)..(9): 2'-deoxy-2'Fluoro
  misc_feature (10)..(12): 2'-O-methyl
  misc_feature (13)..(13): 2'-deoxy-2'Fluoro
  misc_feature (14)..(14): 2'-O-methyl
  misc_feature (15)..(16): 2'-deoxy-2'Fluoro
  misc_feature (17)..(18): 2'-O-methyl
  misc_feature (19)..(19): 2'-deoxy-2'Fluoro
  misc_feature (20)..(21): 2'-O-methyl
ggcuaugguagacgcuggugg

SEQ ID NO: 1546 - RNA, 19 nt, Artificial Sequence
  Description of Artificial Sequence: Target Sequence/siNA sense region
ccugggcgcaacgugcugg

SEQ ID NO: 1547 - RNA, 19 nt, Artificial Sequence
  Description of Artificial Sequence: Target Sequence/siNA antisense region
ccagcacguugcgcccagg

SEQ ID NO: 1548 - DNA, 21 bp, Artificial Sequence
  Description of Artificial Sequence: Target Sequence/siNA sense region (stab00)
  misc_feature (1)..(19): ribonucleotide unmodified or modified as described for this sequence
ccugggcgcaacgugcuggtt

SEQ ID NO: 1549 - DNA, 21 bp, Artificial Sequence
  Description of Artificial Sequence: Target Sequence/siNA antisense region (stab00as)
  misc_feature (1)..(19): ribonucleotide unmodified or modified as described for this sequence
ccagcacguugcgcccaggtt

SEQ ID NO: 1550 - DNA, 21 bp, Artificial Sequence
  Description of Artificial Sequence: Target Sequence/siNA sense region (stab04)
  misc_feature (1)..(1): 5'-3 attached terminal deoxyabasic moiety, inverted abasic, inverted nucleotide or other terminal cap that is optionally present
  misc_feature (21)..(21): 3'-3 attached terminal deoxyabasic moiety, inverted abasic, inverted nucleotide or other terminal cap that is optionally present
  misc_feature (1)..(3): 2'-deoxy-2'Fluoro
  misc_feature (7)..(7): 2'-deoxy-2'Fluoro
  misc_feature (9)..(9): 2'-deoxy-2'Fluoro
  misc_feature (12)..(12): 2'-deoxy-2'Fluoro
  misc_feature (14)..(14): 2'-deoxy-2'Fluoro
  misc_feature (16)..(17): 2'-deoxy-2'Fluoro
  misc_feature (1). .(19): ribonucleotide unmodified or modified as described for this sequence
ccugggcgcaacgugcuggtt

SEQ ID NO: 1551 - DNA, 21 bp, Artificial Sequence
  Description of Artificial Sequence: Target Sequence/siNA antisense region (stab05)
  misc_feature (1)..(2): 2'-deoxy-2'Fluoro
  misc_feature (5)..(5): 2'-deoxy-2'Fluoro
  misc_feature (7)..(7): 2'-deoxy-2'Fluoro
  misc_feature (9)..(10): 2'-deoxy-2'Fluoro
  misc_feature (12)..(12): 2'-deoxy-2'Fluoro
  misc_feature (14)..(16): 2'-deoxy-2'Fluoro
  misc_feature (20)..(20): Phosphorothioate or Phosphorodithioate 3'-Internucleotide Linkage (optionally present)
  misc_feature (1). .(19): ribonucleotide unmodified or modified as described for this sequence
ccagcacguugcgcccaggtt

SEQ ID NO: 1552 - DNA, 21 bp, Artificial Sequence
  Description of Artificial Sequence: Target Sequence/siNA sense region (stab07)
  misc_feature (1)..(1): 5'-3 attached terminal deoxyabasic moiety, inverted abasic, inverted nucleotide or other terminal cap that is optionally present
  misc_feature (21)..(21): 3'-3 attached terminal deoxyabasic moiety, inverted abasic, inverted nucleotide or other terminal cap that is optionally present
  misc_feature (1)..(3): 2'-deoxy-2'Fluoro
  misc_feature (7)..(7): 2'-deoxy-2'Fluoro
  misc_feature (9)..(9): 2'-deoxy-2'Fluoro
  misc_feature (12)..(12): 2'-deoxy-2'Fluoro
  misc_feature (14)..(14): 2'-deoxy-2'Fluoro
  misc_feature (16)..(17): 2'-deoxy-2'Fluoro
  misc_feature (1)..(19): ribonucleotide unmodified or modified as described for this sequence
ccugggcgcaacgugcuggtt

SEQ ID NO: 1553 - DNA, 21 bp, Artificial Sequence
  Description of Artificial Sequence: Target Sequence/siNA antisense region (stab08)
  misc_feature (1)..(2): 2'-deoxy-2'Fluoro
  misc_feature (3)..(4): 2'-O-methyl
  misc_feature (5)..(5): 2'-deoxy-2'Fluoro
  misc_feature (6)..(6): 2'-O-methyl
  misc_feature (7)..(7): 2'-deoxy-2'Fluoro
  misc_feature (8)..(8): 2'-O-methyl
  misc_feature (9)..(10): 2'-deoxy-2'Fluoro
  misc_feature (11)..(11): 2'-O-methyl
  misc_feature (12)..(12): 2'-deoxy-2'Fluoro
  misc_feature (13)..(13): 2'-O-methyl
  misc_feature (14)..(16): 2'-deoxy-2'Fluoro
  misc_feature (17)..(19): 2'-O-methyl
  misc_feature (20)..(20): Phosphorothioate or Phosphorodithioate 3'-Internucleotide Linkage (optionally present)
  misc_feature (1)..(19): ribonucleotide unmodified or modified as described for this sequence
ccagcacguugcgcccaggtt

SEQ ID NO: 1554 - DNA, 21 bp, Artificial Sequence
  Description of Artificial Sequence: Target Sequence/siNA sense region (stab09)
  misc_feature (1)..(1): 5'-3 attached terminal deoxyabasic moiety, inverted abasic, inverted nucleotide or other terminal cap that is optionally present
  misc_feature (21)..(21): 3'-3 attached terminal deoxyabasic moiety, inverted abasic, inverted nucleotide or other terminal cap that is optionally present
  misc_feature (1)..(19): ribonucleotide unmodified or modified as described for this sequence
ccugggcgcaacgugcuggtt

SEQ ID NO: 1555 - DNA, 21 bp, Artificial Sequence
  Description of Artificial Sequence: Target Sequence/siNA antisense region (stab10)
  misc_feature (20)..(20): Phosphorothioate or Phosphorodithioate 3'-Internucleotide Linkage (optionally present)
  misc_feature (1)..(19): ribonucleotide unmodified or modified as described for this sequence
ccagcacguugcgcccaggtt

SEQ ID NO: 1556 - DNA, 21 bp, Artificial Sequence
  Description of Artificial Sequence: Target Sequence/siNA antisense region (stab19)
  misc_feature (21)..(21): 3'-3 attached terminal deoxyabasic moiety, inverted abasic, inverted nucleotide or other terminal cap that is optionally present
  misc_feature (1)..(2): 2'-deoxy-2'Fluoro
  misc_feature (3)..(4): 2'-O-methyl
  misc_feature (5)..(5): 2'-deoxy-2'Fluoro
  misc_feature (6)..(6): 2'-O-methyl
  misc_feature (7)..(7): 2'-deoxy-2'Fluoro
  misc_feature (8)..(8): 2'-O-methyl
  misc_feature (9)..(10): 2'-deoxy-2'Fluoro
  misc_feature (11)..(11): 2'-O-methyl
  misc_feature (12)..(12): 2'-deoxy-2'Fluoro
  misc_feature (13)..(13): 2'-O-methyl
  misc_feature (14)..(16): 2'-deoxy-2'Fluoro
  misc_feature (17)..(19): 2'-O-methyl
  misc_feature (1)..(19): ribonucleotide unmodified or modified as described for this sequence
ccagcacguugcgcccaggtt

SEQ ID NO: 1557 - DNA, 21 bp, Artificial Sequence
  Description of Artificial Sequence: Target Sequence/siNA antisense region (stab22)
  misc_feature (21)..(21): 3'-3 attached terminal deoxyabasic moiety, inverted abasic, inverted nucleotide or other terminal cap that is optionally present
  misc_feature (20)..(20): Phosphorothioate or Phosphorodithioate 3'-Internucleotide Linkage (optionally present)
  misc_feature (1)..(19): ribonucleotide unmodified or modified as described for this sequence
ccagcacguugcgcccaggtt

SEQ ID NO: 1558 - DNA, 21 bp, Artificial Sequence
  Description of Artificial Sequence: Target Sequence/siNA antisense region (stab25)
  misc_feature (4)..(4): 2'-O-methyl
  misc_feature (5)..(5): 2'-deoxy-2'Fluoro
  misc_feature (6)..(6): 2'-O-methyl
  misc_feature (7)..(7): 2'-deoxy-2'Fluoro
  misc_feature (8)..(8): 2'-O-methyl
  misc_feature (9)..(10): 2'-deoxy-2'Fluoro
  misc_feature (11)..(11): 2'-O-methyl
  misc_feature (12)..(12): 2'-deoxy-2'Fluoro
  misc_feature (13)..(13): 2'-O-methyl
  misc_feature (14)..(16): 2'-deoxy-2'Fluoro
  misc_feature (17)..(19): 2'-O-methyl
  misc_feature (20)..(20): Phosphorothioate or Phosphorodithioate 3'-Internucleotide Linkage (optionally present)
  misc_feature (1)..(19): ribonucleotide unmodified or modified as described for this sequence
ccagcacguugcgcccaggtt

SEQ ID NO: 1559 - RNA, 21 nt, Artificial Sequence
  Description of Artificial Sequence: Target Sequence/siNA antisense region (stab35)
  misc_feature (4)..(4): 2'-O-methyl
  misc_feature (5)..(5): 2'-deoxy-2'Fluoro
  misc_feature (6)..(6): 2'-O-methyl
  misc_feature (7)..(7): 2'-deoxy-2'Fluoro
  misc_feature (8)..(8): 2'-O-methyl
  misc_feature (9)..(10): 2'-deoxy-2'Fluoro
  misc_feature (11)..(11): 2'-O-methyl
  misc_feature (12)..(12): 2'-deoxy-2'Fluoro
  misc_feature (13)..(13): 2'-O-methyl
  misc_feature (14)..(16): 2'-deoxy-2'Fluoro
  misc_feature (17)..(21): 2'-O-methyl
ccagcacguugcgcccagguu

SEQ ID NO: 1560 - RNA, 21 nt, Artificial Sequence
  Description of Artificial Sequence: Target Sequence/siNA antisense region (stab36)
  misc_feature (4)..(4): 2'-O-methyl
  misc_feature (5)..(5): 2'-deoxy-2'Fluoro
  misc_feature (6)..(6): 2'-O-methyl
  misc_feature (7)..(7): 2'-deoxy-2'Fluoro
  misc_feature (8)..(8): 2'-O-methyl
  misc_feature (9)..(10): 2'-deoxy-2'Fluoro
  misc_feature (11)..(11): 2'-O-methyl
  misc_feature (12)..(12): 2'-deoxy-2'Fluoro
  misc_feature (13)..(13): 2'-O-methyl
  misc_feature (14)..(16): 2'-deoxy-2'Fluoro
  misc_feature (17)..(21): 2'-O-methyl
ccagcacguugcgcccagggc

SEQ ID NO: 1561 - RNA, 19 nt, Artificial Sequence
  Description of Artificial Sequence: Target Sequence/siNA sense region
ggcaccgagagcagagaug

SEQ ID NO: 1562 - RNA, 19 nt, Artificial Sequence
  Description of Artificial Sequence: Target Sequence/siNA antisense region
caucucugcucucggugcc

SEQ ID NO: 1563 - DNA, 21 bp, Artificial Sequence
  Description of Artificial Sequence: Target Sequence/siNA sense region (stab00)
  misc_feature (1)..(19): ribonucleotide unmodified or modified as described for this sequence
ggcaccgagagcagagaugtt

SEQ ID NO: 1564 - DNA, 21 bp, Artificial Sequence
  Description of Artificial Sequence: Target Sequence/siNA antisense region (stab00as)
  misc_feature (1)..(19): ribonucleotide unmodified or modified as described for this sequence
caucucugcucucggugcctt

SEQ ID NO: 1565 - DNA, 21 bp, Artificial Sequence
  Description of Artificial Sequence: Target Sequence/siNA sense region (stab04)
  misc_feature (1)..(1): 5'-3 attached terminal deoxyabasic moiety, inverted abasic, inverted nucleotide or other terminal cap that is optionally present
  misc_feature (21)..(21): 3'-3 attached terminal deoxyabasic moiety, inverted abasic, inverted nucleotide or other terminal cap that is optionally present
  misc_feature (3)..(3): 2'-deoxy-2'Fluoro
  misc_feature (5)..(6): 2'-deoxy-2'Fluoro
  misc_feature (12)..(12): 2'-deoxy-2'Fluoro
  misc_feature (18)..(18): 2'-deoxy-2'Fluoro
  misc_feature (1)..(19): ribonucleotide unmodified or modified as described for this sequence
ggcaccgagagcagagaugtt

SEQ ID NO: 1566 - DNA, 21 bp, Artificial Sequence
  Description of Artificial Sequence: Target Sequence/siNA antisense region (stab05)
  misc_feature (1)..(1): 2'-deoxy-2'Fluoro
  misc_feature (3)..(7): 2'-deoxy-2'Fluoro
  misc_feature (9)..(13): 2'-deoxy-2'Fluoro
  misc_feature (16)..(16): 2'-deoxy-2'Fluoro
  misc_feature (18)..(19): 2'-deoxy-2'Fluoro
  misc_feature (20)..(20): Phosphorothioate or Phosphorodithioate 3'-Internucleotide Linkage (optionally present)
  misc_feature (1)..(19): ribonucleotide unmodified or modified as described for this sequence
caucucugcucucggugcctt

SEQ ID NO: 1567 - DNA, 21 bp, Artificial Sequence
  Description of Artificial Sequence: Target Sequence/siNA sense region (stab07)
  misc_feature (1)..(1): 5'-3 attached terminal deoxyabasic moiety, inverted abasic, inverted nucleotide or other terminal cap that is optionally present
  misc_feature (21)..(21): 3'-3 attached terminal deoxyabasic moiety, inverted abasic, inverted nucleotide or other terminal cap that is optionally present
  misc_feature (3)..(3): 2'-deoxy-2'Fluoro
  misc_feature (5)..(6): 2'-deoxy-2'Fluoro
  misc_feature (12)..(12): 2'-deoxy-2'Fluoro
  misc_feature (18)..(18): 2'-deoxy-2'Fluoro
  misc_feature (1)..(19): ribonucleotide unmodified or modified as described for this sequence
ggcaccgagagcagagaugtt

SEQ ID NO: 1568 - DNA, 21 bp, Artificial Sequence
  Description of Artificial Sequence: Target Sequence/siNA antisense region (stab08)
  misc_feature (1)..(1): 2'-deoxy-2'Fluoro
  misc_feature (2)..(2): 2'-O-methyl
  misc_feature (3)..(7): 2'-deoxy-2'Fluoro
  misc_feature (8)..(8): 2'-O-methyl
  misc_feature (9)..(13): 2'-deoxy-2'Fluoro
  misc_feature (14)..(15): 2'-O-methyl
  misc_feature (16)..(16): 2'-deoxy-2'Fluoro
  misc_feature (17)..(17): 2'-O-methyl
  misc_feature (18)..(19): 2'-deoxy-2'Fluoro
  misc_feature (20)..(20): Phosphorothioate or Phosphorodithioate 3'-Internucleotide Linkage (optionally present)
  misc_feature (1)..(19): ribonucleotide unmodified or modified as described for this sequence
caucucugcucucggugcctt

SEQ ID NO: 1569 - DNA, 21 bp, Artificial Sequence
  Description of Artificial Sequence: Target Sequence/siNA sense region (stab09)
  misc_feature (1)..(1): 5'-3 attached terminal deoxyabasic moiety, inverted abasic, inverted nucleotide or other terminal cap that is optionally present
  misc_feature (21)..(21): 3'-3 attached terminal deoxyabasic moiety, inverted abasic, inverted nucleotide or other terminal cap that is optionally present
  misc_feature (1)..(19): ribonucleotide unmodified or modified as described for this sequence
ggcaccgagagcagagaugtt

SEQ ID NO: 1570 - DNA, 21 bp, Artificial Sequence
  Description of Artificial Sequence: Target Sequence/siNA antisense region (stab10)
  misc_feature (20)..(20): Phosphorothioate or Phosphorodithioate 3'-Internucleotide Linkage (optionally present)
  misc_feature (1)..(19): ribonucleotide unmodified or modified as described for this sequence
caucucugcucucggugcctt

SEQ ID NO: 1571 - DNA, 21 bp, Artificial Sequence
  Description of Artificial Sequence: Target Sequence/siNA antisense region (stab19)
  misc_feature (21)..(21): 3'-3 attached terminal deoxyabasic moiety, inverted abasic, inverted nucleotide or other terminal cap that is optionally present
  misc_feature (1)..(1): 2'-deoxy-2'Fluoro
  misc_feature (2)..(2): 2'-O-methyl
  misc_feature (3)..(7): 2'-deoxy-2'Fluoro
  misc_feature (8)..(8): 2'-O-methyl
  misc_feature (9)..(13): 2'-deoxy-2'Fluoro
  misc_feature (14)..(15): 2'-O-methyl
  misc_feature (16)..(16): 2'-deoxy-2'Fluoro
  misc_feature (17)..(17): 2'-O-methyl
  misc_feature (18)..(19): 2'-deoxy-2'Fluoro
  misc_feature (1)..(19): ribonucleotide unmodified or modified as described for this sequence
caucucugcucucggugcctt

SEQ ID NO: 1572 - DNA, 21 bp, Artificial Sequence
  Description of Artificial Sequence: Target Sequence/siNA antisense region (stab22)
  misc_feature (21)..(21): 3'-3 attached terminal deoxyabasic moiety, inverted abasic, inverted nucleotide or other terminal cap that is optionally present
  misc_feature (20)..(20): Phosphorothioate or Phosphorodithioate 3'-Internucleotide Linkage (optionally present)
  misc_feature (1)..(19): ribonucleotide unmodified or modified as described for this sequence
caucucugcucucggugcctt

SEQ ID NO: 1573 - DNA, 21 bp, Artificial Sequence
  Description of Artificial Sequence: Target Sequence/siNA antisense region (stab25)
  misc_feature (4)..(7): 2'-deoxy-2'Fluoro
  misc_feature (8)..(8): 2'-O-methyl
  misc_feature (9)..(13): 2'-deoxy-2'Fluoro
  misc_feature (14)..(15): 2'-O-methyl
  misc_feature (16)..(16): 2'-deoxy-2'Fluoro
  misc_feature (17)..(17): 2'-O-methyl
  misc_feature (18)..(19): 2'-deoxy-2'Fluoro
  misc_feature (20)..(20): Phosphorothioate or Phosphorodithioate 3'-Internucleotide Linkage (optionally present)
  misc_feature (1)..(19): ribonucleotide unmodified or modified as described for this sequence
caucucugcucucggugcctt

SEQ ID NO: 1574 - RNA, 21 nt, Artificial Sequence
  Description of Artificial Sequence: Target Sequence/siNA antisense region (stab35)
  misc_feature (4)..(7): 2'-deoxy-2'Fluoro
  misc_feature (8)..(8): 2'-O-methyl
  misc_feature (9)..(13): 2'-deoxy-2'Fluoro
  misc_feature (14)..(15): 2'-O-methyl
  misc_feature (16)..(16): 2'-deoxy-2'Fluoro
  misc_feature (17)..(17): 2'-O-methyl
  misc_feature (18)..(19): 2'-deoxy-2'Fluoro
  misc_feature (20)..(21): 2'-O-methyl
caucucugcucucggugccuu

SEQ ID NO: 1575 - RNA, 21 nt, Artificial Sequence
  Description of Artificial Sequence: Target Sequence/siNA antisense region (stab36)
  misc_feature (4)..(7): 2'-deoxy-2'Fluoro
  misc_feature (8)..(8): 2'-O-methyl
  misc_feature (9)..(13): 2'-deoxy-2'Fluoro
  misc_feature (14)..(15): 2'-O-methyl
  misc_feature (16)..(16): 2'-deoxy-2'Fluoro
  misc_feature (17)..(17): 2'-O-methyl
  misc_feature (18)..(19): 2'-deoxy-2'Fluoro
  misc_feature (20)..(21): 2'-O-methyl
caucucugcucucggugccca

SEQ ID NO: 1576 - RNA, 19 nt, Artificial Sequence
  Description of Artificial Sequence: Target Sequence/siNA sense region
ggcccuggcugggcccagu

SEQ ID NO: 1577 - RNA, 19 nt, Artificial Sequence
  Description of Artificial Sequence: Target Sequence/siNA antisense region
acugggcccagccagggcc

SEQ ID NO: 1578 - DNA, 21 bp, Artificial Sequence
  Description of Artificial Sequence: Target Sequence/siNA sense region (stab00)
  misc_feature (1)..(19): ribonucleotide unmodified or modified as described for this sequence
ggcccuggcugggcccagutt

SEQ ID NO: 1579 - DNA, 21 bp, Artificial Sequence
  Description of Artificial Sequence: Target Sequence/siNA antisense region (stab00as)
  misc_feature (1)..(19): ribonucleotide unmodified or modified as described for this sequence
acugggcccagccagggcctt

SEQ ID NO: 1580 - DNA, 21 bp, Artificial Sequence
  Description of Artificial Sequence: Target Sequence/siNA sense region (stab04)
  misc_feature (1)..(1): 5'-3 attached terminal deoxyabasic moiety, inverted abasic, inverted nucleotide or other terminal cap that is optionally present
  misc_feature (21)..(21): 3'-3 attached terminal deoxyabasic moiety, inverted abasic, inverted nucleotide or other terminal cap that is optionally present
  misc_feature (3)..(6): 2'-deoxy-2'Fluoro
  misc_feature (9)..(10): 2'-deoxy-2'Fluoro
  misc_feature (14)..(16): 2'-deoxy-2'Fluoro
  misc_feature (19)..(19): 2'-deoxy-2'Fluoro
  misc_feature (1)..(19): ribonucleotide unmodified or modified as described for this sequence
ggcccuggcugggcccagutt

SEQ ID NO: 1581 - DNA, 21 bp, Artificial Sequence
  Description of Artificial Sequence: Target Sequence/siNA antisense region (stab05)
  misc_feature (2)..(3): 2'-deoxy-2'Fluoro
  misc_feature (7)..(9): 2'-deoxy-2'Fluoro
  misc_feature (12)..(13): 2'-deoxy-2'Fluoro
  misc_feature (18)..(19): 2'-deoxy-2'Fluoro
  misc_feature (20)..(20): Phosphorothioate or Phosphorodithioate 3'-Internucleotide Linkage (optionally present)
  misc_feature (1)..(19): ribonucleotide unmodified or modified as described for this sequence
acugggcccagccagggcctt

SEQ ID NO: 1582 - DNA, 21 bp, Artificial Sequence
  Description of Artificial Sequence: Target Sequence/siNA sense region (stab07)
  misc_feature (1)..(1): 5'-3 attached terminal deoxyabasic moiety, inverted abasic, inverted nucleotide or other terminal cap that is optionally present
  misc_feature (21)..(21): 3'-3 attached terminal deoxyabasic moiety, inverted abasic, inverted nucleotide or other terminal cap that is optionally present
  misc_feature (3)..(6): 2'-deoxy-2'Fluoro
  misc_feature (9)..(10): 2'-deoxy-2'Fluoro
  misc_feature (14)..(16): 2'-deoxy-2'Fluoro
  misc_feature (19)..(19): 2'-deoxy-2'Fluoro
  misc_feature (1)..(19): ribonucleotide unmodified or modified as described for this sequence
ggcccuggcugggcccagutt

SEQ ID NO: 1583 - DNA, 21 bp, Artificial Sequence
  Description of Artificial Sequence: Target Sequence/siNA antisense region (stab08)
  misc_feature (1)..(1): 2'-O-methyl
  misc_feature (2)..(3): 2'-deoxy-2'Fluoro
  misc_feature (4)..(6): 2'-O-methyl
  misc_feature (7)..(9): 2'-deoxy-2'Fluoro
  misc_feature (10)..(11): 2'-O-methyl
  misc_feature (12)..(13): 2'-deoxy-2'Fluoro
  misc_feature (14)..(17): 2'-O-methyl
  misc_feature (18)..(19): 2'-deoxy-2'Fluoro
  misc_feature (20)..(20): Phosphorothioate or Phosphorodithioate 3'-Internucleotide Linkage (optionally present)
  misc_feature (1)..(19): ribonucleotide unmodified or modified as described for this sequence
acugggcccagccagggcctt

SEQ ID NO: 1584 - DNA, 21 bp, Artificial Sequence
  Description of Artificial Sequence: Target Sequence/siNA sense region (stab09)
  misc_feature (1)..(1): 5'-3 attached terminal deoxyabasic moiety, inverted abasic, inverted nucleotide or other terminal cap that is optionally present
  misc_feature (21)..(21): 3'-3 attached terminal deoxyabasic moiety, inverted abasic, inverted nucleotide or other terminal cap that is optionally present
  misc_feature (1)..(19): ribonucleotide unmodified or modified as described for this sequence
ggcccuggcugggcccagutt

SEQ ID NO: 1585 - DNA, 21 bp, Artificial Sequence
  Description of Artificial Sequence: Target Sequence/siNA antisense region (stab10)
  misc_feature (20)..(20): Phosphorothioate or Phosphorodithioate 3'-Internucleotide Linkage (optionally present)
  misc_feature (1)..(19): ribonucleotide unmodified or modified as described for this sequence
acugggcccagccagggcctt

SEQ ID NO: 1586 - DNA, 21 bp, Artificial Sequence
  Description of Artificial Sequence: Target Sequence/siNA antisense region (stab19)
  misc_feature (21)..(21): 3'-3 attached terminal deoxyabasic moiety, inverted abasic, inverted nucleotide or other terminal cap that is optionally present
  misc_feature (1)..(1): 2'-O-methyl
  misc_feature (2)..(3): 2'-deoxy-2'Fluoro
  misc_feature (4)..(6): 2'-O-methyl
  misc_feature (7)..(9): 2'-deoxy-2'Fluoro
  misc_feature (10)..(11): 2'-O-methyl
  misc_feature (12)..(13): 2'-deoxy-2'Fluoro
  misc_feature (14)..(17): 2'-O-methyl
  misc_feature (18)..(19): 2'-deoxy-2'Fluoro
  misc_feature (1)..(19): ribonucleotide unmodified or modified as described for this sequence
acugggcccagccagggcctt

SEQ ID NO: 1587 - DNA, 21 bp, Artificial Sequence
  Description of Artificial Sequence: Target Sequence/siNA antisense region (stab22)
  misc_feature (21)..(21): 3'-3 attached terminal deoxyabasic moiety, inverted abasic, inverted nucleotide or other terminal cap that is optionally present
  misc_feature (20)..(20): Phosphorothioate or Phosphorodithioate 3'-Internucleotide Linkage (optionally present)
  misc_feature (1)..(19): ribonucleotide unmodified or modified as described for this sequence
acugggcccagccagggcctt

SEQ ID NO: 1588 - DNA, 21 bp, Artificial Sequence
  Description of Artificial Sequence: Target Sequence/siNA antisense region (stab25)
  misc_feature (4)..(6): 2'-O-methyl
  misc_feature (7)..(9): 2'-deoxy-2'Fluoro
  misc_feature (10)..(11): 2'-O-methyl
  misc_feature (12)..(13): 2'-deoxy-2'Fluoro
  misc_feature (14)..(17): 2'-O-methyl
  misc_feature (18)..(19): 2'-deoxy-2'Fluoro
  misc_feature (20)..(20): Phosphorothioate or Phosphorodithioate 3'-Internucleotide Linkage (optionally present)
  misc_feature (1)..(19): ribonucleotide unmodified or modified as described for this sequence
acugggcccagccagggcctt

SEQ ID NO: 1589 - RNA, 21 nt, Artificial Sequence
  Description of Artificial Sequence: Target Sequence/siNA antisense region (stab35)
  misc_feature (4)..(6): 2'-O-methyl
  misc_feature (7)..(9): 2'-deoxy-2'Fluoro
  misc_feature (10)..(11): 2'-O-methyl
  misc_feature (12)..(13): 2'-deoxy-2'Fluoro
  misc_feature (14)..(17): 2'-O-methyl
  misc_feature (18)..(19): 2'-deoxy-2'Fluoro
  misc_feature (20)..(21): 2'-O-methyl
acugggcccagccagggccuu

SEQ ID NO: 1590 - RNA, 21 nt, Artificial Sequence
  Description of Artificial Sequence: Target Sequence/siNA antisense region (stab36)
  misc_feature (4)..(6): 2'-O-methyl
  misc_feature (7)..(9): 2'-deoxy-2'Fluoro
  misc_feature (10)..(11): 2'-O-methyl
  misc_feature (12)..(13): 2'-deoxy-2'Fluoro
  misc_feature (14)..(17): 2'-O-methyl
  misc_feature (18)..(19): 2'-deoxy-2'Fluoro
  misc_feature (20)..(21): 2'-O-methyl
acugggcccagccagggccau

SEQ ID NO: 1591 - RNA, 19 nt, Artificial Sequence
  Description of Artificial Sequence: Target Sequence/siNA sense region
uggcugcugcccccagugg

SEQ ID NO: 1592 - RNA, 19 nt, Artificial Sequence
  Description of Artificial Sequence: Target Sequence/siNA antisense region
ccacugggggcagcagcca

SEQ ID NO: 1593 - DNA, 21 bp, Artificial Sequence
  Description of Artificial Sequence: Target Sequence/siNA sense region (stab00)
  misc_feature (1)..(19): ribonucleotide unmodified or modified as described for this sequence
uggcugcugcccccaguggtt

SEQ ID NO: 1594 - DNA, 21 bp, Artificial Sequence
  Description of Artificial Sequence: Target Sequence/siNA antisense region (stab00as)
  misc_feature (1)..(19): ribonucleotide unmodified or modified as described for this sequence
ccacugggggcagcagccatt

SEQ ID NO: 1595 - DNA, 21 bp, Artificial Sequence
  Description of Artificial Sequence: Target Sequence/siNA sense region (stab04)
  misc_feature (1)..(1): 5'-3 attached terminal deoxyabasic moiety, inverted abasic, inverted nucleotide or other terminal cap that is optionally present
  misc_feature (21)..(21): 3'-3 attached terminal deoxyabasic moiety, inverted abasic, inverted nucleotide or other terminal cap that is optionally present
  misc_feature (1)..(1): 2'-deoxy-2'Fluoro
  misc_feature (4)..(5): 2'-deoxy-2'Fluoro
  misc_feature (7)..(8): 2'-deoxy-2'Fluoro
  misc_feature (10)..(14): 2'-deoxy-2'Fluoro
  misc_feature (17)..(17): 2'-deoxy-2'Fluoro
  misc_feature (1)..(19): ribonucleotide unmodified or modified as described for this sequence
uggcugcugcccccaguggtt

SEQ ID NO: 1596 - DNA, 21 bp, Artificial Sequence
  Description of Artificial Sequence: Target Sequence/siNA antisense region (stab05)
  misc_feature (1)..(2): 2'-deoxy-2'Fluoro
  misc_feature (4)..(5): 2'-deoxy-2'Fluoro
  misc_feature (11)..(11): 2'-deoxy-2'Fluoro
  misc_feature (14)..(14): 2'-deoxy-2'Fluoro
  misc_feature (17)..(18): 2'-deoxy-2'Fluoro
  misc_feature (20)..(20): Phosphorothioate or Phosphorodithioate 3'-Internucleotide Linkage (optionally present)
  misc_feature (1)..(19): ribonucleotide unmodified or modified as described for this sequence
ccacugggggcagcagccatt

SEQ ID NO: 1597 - DNA, 21 bp, Artificial Sequence
  Description of Artificial Sequence: Target Sequence/siNA sense region (stab07)
  misc_feature (1)..(1): 5'-3 attached terminal deoxyabasic moiety, inverted abasic, inverted nucleotide or other terminal cap that is optionally present
  misc_feature (21)..(21): 3'-3 attached terminal deoxyabasic moiety, inverted abasic, inverted nucleotide or other terminal cap that is optionally present
  misc_feature (1)..(1): 2'-deoxy-2'Fluoro
  misc_feature (4)..(5): 2'-deoxy-2'Fluoro
  misc_feature (7)..(8): 2'-deoxy-2'Fluoro
  misc_feature (10)..(14): 2'-deoxy-2'Fluoro
  misc_feature (17)..(17): 2'-deoxy-2'Fluoro
  misc_feature (1)..(19): ribonucleotide unmodified or modified as described for this sequence
uggcugcugcccccaguggtt

SEQ ID NO: 1598 - DNA, 21 bp, Artificial Sequence
  Description of Artificial Sequence: Target Sequence/siNA antisense region (stab08)
  misc_feature (1)..(2): 2'-deoxy-2'Fluoro
  misc_feature (3)..(3): 2'-O-methyl
  misc_feature (4)..(5): 2'-deoxy-2'Fluoro
  misc_feature (6)..(10): 2'-O-methyl
  misc_feature (11)..(11): 2'-deoxy-2'Fluoro
  misc_feature (12)..(13): 2'-O-methyl
  misc_feature (14)..(14): 2'-deoxy-2'Fluoro
  misc_feature (15)..(16): 2'-O-methyl
  misc_feature (17)..(18): 2'-deoxy-2'Fluoro
  misc_feature (19)..(19): 2'-O-methyl
  misc_feature (20)..(20): Phosphorothioate or Phosphorodithioate 3'-Internucleotide Linkage (optionally present)
  misc_feature (1)..(19): ribonucleotide unmodified or modified as described for this sequence
ccacugggggcagcagccatt

SEQ ID NO: 1599 - DNA, 21 bp, Artificial Sequence
  Description of Artificial Sequence: Target Sequence/siNA sense region (stab09)
  misc_feature (1)..(1): 5'-3 attached terminal deoxyabasic moiety, inverted abasic, inverted nucleotide or other terminal cap that is optionally present
  misc_feature (21)..(21): 3'-3 attached terminal deoxyabasic moiety, inverted abasic, inverted nucleotide or other terminal cap that is optionally present
  misc_feature (1)..(19): ribonucleotide unmodified or modified as described for this sequence
uggcugcugcccccaguggtt

SEQ ID NO: 1600 - DNA, 21 bp, Artificial Sequence
  Description of Artificial Sequence: Target Sequence/siNA antisense region (stab10)
  misc_feature (20)..(20): Phosphorothioate or Phosphorodithioate 3'-Internucleotide Linkage (optionally present)
  misc_feature (1)..(19): ribonucleotide unmodified or modified as described for this sequence
ccacugggggcagcagccatt

SEQ ID NO: 1601 - DNA, 21 bp, Artificial Sequence
  Description of Artificial Sequence: Target Sequence/siNA antisense region (stab19)
  misc_feature (21)..(21): 3'-3 attached terminal deoxyabasic moiety, inverted abasic, inverted nucleotide or other terminal cap that is optionally present
  misc_feature (1)..(2): 2'-deoxy-2'Fluoro
  misc_feature (3)..(3): 2'-O-methyl
  misc_feature (4)..(5): 2'-deoxy-2'Fluoro
  misc_feature (6)..(10): 2'-O-methyl
  misc_feature (11)..(11): 2'-deoxy-2'Fluoro
  misc_feature (12)..(13): 2'-O-methyl
  misc_feature (14)..(14): 2'-deoxy-2'Fluoro
  misc_feature (15)..(16): 2'-O-methyl
  misc_feature (17)..(18): 2'-deoxy-2'Fluoro
  misc_feature (19)..(19): 2'-O-methyl
  misc_feature (1)..(19): ribonucleotide unmodified or modified as described for this sequence
ccacugggggcagcagccatt

SEQ ID NO: 1602 - DNA, 21 bp, Artificial Sequence
  Description of Artificial Sequence: Target Sequence/siNA antisense region (stab22)
  misc_feature (21)..(21): 3'-3 attached terminal deoxyabasic moiety, inverted abasic, inverted nucleotide or other terminal cap that is optionally present
  misc_feature (20)..(20): Phosphorothioate or Phosphorodithioate 3'-Internucleotide Linkage (optionally present)
  misc_feature (1)..(19): ribonucleotide unmodified or modified as described for this sequence
ccacugggggcagcagccatt

SEQ ID NO: 1603 - DNA, 21 bp, Artificial Sequence
  Description of Artificial Sequence: Target Sequence/siNA antisense region (stab25)
  misc_feature (4)..(5): 2'-deoxy-2'Fluoro
  misc_feature (6)..(10): 2'-O-methyl
  misc_feature (11)..(11): 2'-deoxy-2'Fluoro
  misc_feature (12)..(13): 2'-O-methyl
  misc_feature (14)..(14): 2'-deoxy-2'Fluoro
  misc_feature (15)..(16): 2'-O-methyl
  misc_feature (17)..(18): 2'-deoxy-2'Fluoro
  misc_feature (19)..(19): 2'-O-methyl
  misc_feature (20)..(20): Phosphorothioate or Phosphorodithioate 3'-Internucleotide Linkage (optionally present)
  misc_feature (1)..(3): ribonucleotide
ccacugggggcagcagccatt

SEQ ID NO: 1604 - RNA, 21 nt, Artificial Sequence
  Description of Artificial Sequence: Target Sequence/siNA antisense region (stab35)
  misc_feature (4)..(5): 2'-deoxy-2'Fluoro
  misc_feature (6)..(10): 2'-O-methyl
  misc_feature (11)..(11): 2'-deoxy-2'Fluoro
  misc_feature (12)..(13): 2'-O-methyl
  misc_feature (14)..(14): 2'-deoxy-2'Fluoro
  misc_feature (15)..(16): 2'-O-methyl
  misc_feature (17)..(18): 2'-deoxy-2'Fluoro
  misc_feature (19)..(21): 2'-O-methyl
ccacugggggcagcagccauu

SEQ ID NO: 1605 - RNA, 21 nt, Artificial Sequence
  Description of Artificial Sequence: Target Sequence/siNA antisense region (stab36)
  misc_feature (4)..(5): 2'-deoxy-2'Fluoro
  misc_feature (6)..(10): 2'-O-methyl
  misc_feature (11)..(11): 2'-deoxy-2'Fluoro
  misc_feature (12)..(13): 2'-O-methyl
  misc_feature (14)..(14): 2'-deoxy-2'Fluoro
  misc_feature (15)..(16): 2'-O-methyl
  misc_feature (17)..(18): 2'-deoxy-2'Fluoro
  misc_feature (19)..(21): 2'-O-methyl
ccacugggggcagcagccacu

SEQ ID NO: 1606 - RNA, 19 nt, Artificial Sequence
  Description of Artificial Sequence: Target Sequence/siNA sense region
gucuggcugcucaaugggc

SEQ ID NO: 1607 - RNA, 19 nt, Artificial Sequence
  Description of Artificial Sequence: Target Sequence/siNA antisense region
gcccauugagcagccagac

SEQ ID NO: 1608 - DNA, 21 bp, Artificial Sequence
  Description of Artificial Sequence: Target Sequence/siNA sense region (stab00)
  misc_feature (1)..(19): ribonucleotide unmodified or modified as described for this sequence
gucuggcugcucaaugggctt

SEQ ID NO: 1609 - DNA, 21 bp, Artificial Sequence
  Description of Artificial Sequence: Target Sequence/siNA antisense region (stab00as)
  misc_feature (1)..(19): ribonucleotide unmodified or modified as described for this sequence
gcccauugagcagccagactt

SEQ ID NO: 1610 - DNA, 21 bp, Artificial Sequence
  Description of Artificial Sequence: Target Sequence/siNA sense region (stab04)
  misc_feature (1)..(1): 5'-3 attached terminal deoxyabasic moiety, inverted abasic, inverted nucleotide or other terminal cap that is optionally present
  misc_feature (21)..(21): 3'-3 attached terminal deoxyabasic moiety, inverted abasic, inverted nucleotide or other terminal cap that is optionally present
  misc_feature (2)..(4): 2'-deoxy-2'Fluoro
  misc_feature (7)..(8): 2'-deoxy-2'Fluoro
  misc_feature (10)..(12): 2'-deoxy-2'Fluoro
  misc_feature (15)..(15): 2'-deoxy-2'Fluoro
  misc_feature (19)..(19): 2'-deoxy-2'Fluoro
  misc_feature (1)..(19): ribonucleotide unmodified or modified as described for this sequence
gucuggcugcucaaugggctt

SEQ ID NO: 1611 - DNA, 21 bp, Artificial Sequence
  Description of Artificial Sequence: Target Sequence/siNA antisense region (stab05)
  misc_feature (2)..(4): 2'-deoxy-2'Fluoro
  misc_feature (6)..(7): 2'-deoxy-2'Fluoro
  misc_feature (11)..(11): 2'-deoxy-2'Fluoro
  misc_feature (14)..(15): 2'-deoxy-2'Fluoro
  misc_feature (19)..(19): 2'-deoxy-2'Fluoro
  misc_feature (20)..(20): Phosphorothioate or Phosphorodithioate 3'-Internucleotide Linkage (optionally present)
  misc_feature (1)..(19): ribonucleotide unmodified or modified as described for this sequence
gcccauugagcagccagactt

SEQ ID NO: 1612 - DNA, 21 bp, Artificial Sequence
  Description of Artificial Sequence: Target Sequence/siNA sense region (stab07)
  misc_feature (1)..(1): 5'-3 attached terminal deoxyabasic moiety, inverted abasic, inverted nucleotide or other terminal cap that is optionally present
  misc_feature (21)..(21): 3'-3 attached terminal deoxyabasic moiety, inverted abasic, inverted nucleotide or other terminal cap that is optionally present
  misc_feature (2)..(4): 2'-deoxy-2'Fluoro
  misc_feature (7)..(8): 2'-deoxy-2'Fluoro
  misc_feature (10)..(12): 2'-deoxy-2'Fluoro
  misc_feature (15)..(15): 2'-deoxy-2'Fluoro
  misc_feature (19)..(19): 2'-deoxy-2'Fluoro
  misc_feature (1)..(19): ribonucleotide unmodified or modified as described for this sequence
gucuggcugcucaaugggctt

SEQ ID NO: 1613 - DNA, 21 bp, Artificial Sequence
  Description of Artificial Sequence: Target Sequence/siNA antisense region (stab08)
  misc_feature (1)..(1): 2'-O-methyl
  misc_feature (2)..(4): 2'-deoxy-2'Fluoro
  misc_feature (5)..(5): 2'-O-methyl
  misc_feature (6)..(7): 2'-deoxy-2'Fluoro
  misc_feature (8)..(10): 2'-O-methyl
  misc_feature (11)..(11): 2'-deoxy-2'Fluoro
  misc_feature (12)..(13): 2'-O-methyl
  misc_feature (14)..(15): 2'-deoxy-2'Fluoro
  misc_feature (16)..(18): 2'-O-methyl
  misc_feature (19)..(19): 2'-deoxy-2'Fluoro
  misc_feature (20)..(20): Phosphorothioate or Phosphorodithioate 3'-Internucleotide Linkage (optionally present)
  misc_feature (1)..(19): ribonucleotide unmodified or modified as described for this sequence
gcccauugagcagccagactt

SEQ ID NO: 1614 - DNA, 21 bp, Artificial Sequence
  Description of Artificial Sequence: Target Sequence/siNA sense region (stab09)
  misc_feature (1)..(1): 5'-3 attached terminal deoxyabasic moiety, inverted abasic, inverted nucleotide or other terminal cap that is optionally present
  misc_feature (21)..(21): 3'-3 attached terminal deoxyabasic moiety, inverted abasic, inverted nucleotide or other terminal cap that is optionally present
  misc_feature (1)..(19): ribonucleotide unmodified or modified as described for this sequence
gucuggcugcucaaugggctt

SEQ ID NO: 1615 - DNA, 21 bp, Artificial Sequence
  Description of Artificial Sequence: Target Sequence/siNA antisense region (stab10)
  misc_feature (20)..(20): Phosphorothioate or Phosphorodithioate 3'-Internucleotide Linkage (optionally present)
  misc_feature (1)..(19): ribonucleotide unmodified or modified as described for this sequence
gcccauugagcagccagactt

SEQ ID NO: 1616 - DNA, 21 bp, Artificial Sequence
  Description of Artificial Sequence: Target Sequence/siNA antisense region (stab19)
  misc_feature (21)..(21): 3'-3 attached terminal deoxyabasic moiety, inverted abasic, inverted nucleotide or other terminal cap that is optionally present
  misc_feature (1)..(1): 2'-O-methyl
  misc_feature (2)..(4): 2'-deoxy-2'Fluoro
  misc_feature (5)..(5): 2'-O-methyl
  misc_feature (6)..(7): 2'-deoxy-2'Fluoro
  misc_feature (8)..(10): 2'-O-methyl
  misc_feature (11)..(11): 2'-deoxy-2'Fluoro
  misc_feature (12)..(13): 2'-O-methyl
  misc_feature (14)..(15): 2'-deoxy-2'Fluoro
  misc_feature (16)..(18): 2'-O-methyl
  misc_feature (19)..(19): 2'-deoxy-2'Fluoro
  misc_feature (1)..(19): ribonucleotide unmodified or modified as described for this sequence
gcccauugagcagccagactt

SEQ ID NO: 1617 - DNA, 21 bp, Artificial Sequence
  Description of Artificial Sequence: Target Sequence/siNA antisense region (stab22)
  misc_feature (21)..(21): 3'-3 attached terminal deoxyabasic moiety, inverted abasic, inverted nucleotide or other terminal cap that is optionally present
  misc_feature (20)..(20): Phosphorothioate or Phosphorodithioate 3'-Internucleotide Linkage (optionally present)
  misc_feature (1)..(19): ribonucleotide unmodified or modified as described for this sequence
gcccauugagcagccagactt

SEQ ID NO: 1618 - DNA, 21 bp, Artificial Sequence
  Description of Artificial Sequence: Target Sequence/siNA antisense region (stab25)
  misc_feature (4)..(4): 2'-deoxy-2'Fluoro
  misc_feature (5)..(5): 2'-O-methyl
  misc_feature (6)..(7): 2'-deoxy-2'Fluoro
  misc_feature (8)..(10): 2'-O-methyl
  misc_feature (11)..(11): 2'-deoxy-2'Fluoro
  misc_feature (12)..(13): 2'-O-methyl
  misc_feature (14)..(15): 2'-deoxy-2'Fluoro
  misc_feature (16)..(18): 2'-O-methyl
  misc_feature (19)..(19): 2'-deoxy-2'Fluoro
  misc_feature (20)..(20): Phosphorothioate or Phosphorodithioate 3'-Internucleotide Linkage (optionally present)
  misc_feature (1)..(3): ribonucleotide
gcccauugagcagccagactt

SEQ ID NO: 1619 - RNA, 21 nt, Artificial Sequence
  Description of Artificial Sequence: Target Sequence/siNA antisense region (stab35)
  misc_feature (4)..(4): 2'-deoxy-2'Fluoro
  misc_feature (5)..(5): 2'-O-methyl
  misc_feature (6)..(7): 2'-deoxy-2'Fluoro
  misc_feature (8)..(10): 2'-O-methyl
  misc_feature (11)..(11): 2'-deoxy-2'Fluoro
  misc_feature (12)..(13): 2'-O-methyl
  misc_feature (14)..(15): 2'-deoxy-2'Fluoro
  misc_feature (16)..(18): 2'-O-methyl
  misc_feature (19)..(19): 2'-deoxy-2'Fluoro
  misc_feature (20)..(21): 2'-O-methyl
gcccauugagcagccagacuu

SEQ ID NO: 1620 - RNA, 21 nt, Artificial Sequence
  Description of Artificial Sequence: Target Sequence/siNA antisense region (stab36)
  misc_feature (4)..(4): 2'-deoxy-2'Fluoro
  misc_feature (5)..(5): 2'-O-methyl
  misc_feature (6)..(7): 2'-deoxy-2'Fluoro
  misc_feature (8)..(10): 2'-O-methyl
  misc_feature (11)..(11): 2'-deoxy-2'Fluoro
  misc_feature (12)..(13): 2'-O-methyl
  misc_feature (14)..(15): 2'-deoxy-2'Fluoro
  misc_feature (16)..(18): 2'-O-methyl
  misc_feature (19)..(19): 2'-deoxy-2'Fluoro
  misc_feature (20)..(21): 2'-O-methyl
gcccauugagcagccagacca

SEQ ID NO: 1621 - RNA, 19 nt, Artificial Sequence
  Description of Artificial Sequence: Target Sequence/siNA sense region
cuguuggugcucgucuccu

SEQ ID NO: 1622 - RNA, 19 nt, Artificial Sequence
  Description of Artificial Sequence: Target Sequence/siNA antisense region
aggagacgagcaccaacag

SEQ ID NO: 1623 - DNA, 21 bp, Artificial Sequence
  Description of Artificial Sequence: Target Sequence/siNA sense region (stab00)
  misc_feature (1)..(19): ribonucleotide unmodified or modified as described for this sequence
cuguuggugcucgucuccutt

SEQ ID NO: 1624 - DNA, 21 bp, Artificial Sequence
  Description of Artificial Sequence: Target Sequence/siNA antisense region (stab00as)
  misc_feature (1)..(19): ribonucleotide unmodified or modified as described for this sequence
aggagacgagcaccaacagtt

SEQ ID NO: 1625 - DNA, 21 bp, Artificial Sequence
  Description of Artificial Sequence: Target Sequence/siNA sense region (stab04)
  misc_feature (1)..(1): 5'-3 attached terminal deoxyabasic moiety, inverted abasic, inverted nucleotide or other terminal cap that is optionally present
  misc_feature (21)..(21): 3'-3 attached terminal deoxyabasic moiety, inverted abasic, inverted nucleotide or other terminal cap that is optionally present
  misc_feature (1)..(2): 2'-deoxy-2'Fluoro
  misc_feature (4)..(5): 2'-deoxy-2'Fluoro
  misc_feature (8)..(8): 2'-deoxy-2'Fluoro
  misc_feature (10)..(12): 2'-deoxy-2'Fluoro
  misc_feature (14)..(19): 2'-deoxy-2'Fluoro
  misc_feature (1)..(19): ribonucleotide unmodified or modified as described for this sequence
cuguuggugcucgucuccutt

SEQ ID NO: 1626 - DNA, 21 bp, Artificial Sequence
  Description of Artificial Sequence: Target Sequence/siNA antisense region (stab05)
  misc_feature (7)..(7): 2'-deoxy-2'Fluoro
  misc_feature (11)..(11): 2'-deoxy-2'Fluoro
  misc_feature (13)..(14): 2'-deoxy-2'Fluoro
  misc_feature (17)..(17): 2'-deoxy-2'Fluoro
  misc_feature (20)..(20): Phosphorothioate or Phosphorodithioate 3'-Internucleotide Linkage (optionally present)
  misc_feature (1)..(19): ribonucleotide unmodified or modified as described for this sequence
aggagacgagcaccaacagtt

SEQ ID NO: 1627 - DNA, 21 bp, Artificial Sequence
  Description of Artificial Sequence: Target Sequence/siNA sense region (stab07)
  misc_feature (1)..(1): 5'-3 attached terminal deoxyabasic moiety, inverted abasic, inverted nucleotide or other terminal cap that is optionally present
  misc_feature (21)..(21): 3'-3 attached terminal deoxyabasic moiety, inverted abasic, inverted nucleotide or other terminal cap that is optionally present
  misc_feature (1)..(2): 2'-deoxy-2'Fluoro
  misc_feature (4)..(5): 2'-deoxy-2'Fluoro
  misc_feature (8)..(8): 2'-deoxy-2'Fluoro
  misc_feature (10)..(12): 2'-deoxy-2'Fluoro
  misc_feature (14)..(19): 2'-deoxy-2'Fluoro
  misc_feature (1)..(19): ribonucleotide unmodified or modified as described for this sequence
cuguuggugcucgucuccutt

SEQ ID NO: 1628 - DNA, 21 bp, Artificial Sequence
  Description of Artificial Sequence: Target Sequence/siNA antisense region (stab08)
  misc_feature (1)..(6): 2'-O-methyl
  misc_feature (7)..(7): 2'-deoxy-2'Fluoro
  misc_feature (8)..(10): 2'-O-methyl
  misc_feature (11)..(11): 2'-deoxy-2'Fluoro
  misc_feature (12)..(12): 2'-O-methyl
  misc_feature (13)..(14): 2'-deoxy-2'Fluoro
  misc_feature (15)..(16): 2'-O-methyl
  misc_feature (17)..(17): 2'-deoxy-2'Fluoro
  misc_feature (18)..(19): 2'-O-methyl
  misc_feature (20)..(20): Phosphorothioate or Phosphorodithioate 3'-Internucleotide Linkage (optionally present)
  misc_feature (1)..(19): ribonucleotide unmodified or modified as described for this sequence
aggagacgagcaccaacagtt

SEQ ID NO: 1629 - DNA, 21 bp, Artificial Sequence
  Description of Artificial Sequence: Target Sequence/siNA sense region (stab09)
  misc_feature (1)..(1): 5'-3 attached terminal deoxyabasic moiety, inverted abasic, inverted nucleotide or other terminal cap that is optionally present
  misc_feature (21)..(21): 3'-3 attached terminal deoxyabasic moiety, inverted abasic, inverted nucleotide or other terminal cap that is optionally present
  misc_feature (1)..(19): ribonucleotide unmodified or modified as described for this sequence
cuguuggugcucgucuccutt

SEQ ID NO: 1630 - DNA, 21 bp, Artificial Sequence
  Description of Artificial Sequence: Target Sequence/siNA antisense region (stab10)
  misc_feature (20)..(20): Phosphorothioate or Phosphorodithioate 3'-Internucleotide Linkage (optionally present)
  misc_feature (1)..(19): ribonucleotide unmodified or modified as described for this sequence
aggagacgagcaccaacagtt

SEQ ID NO: 1631 - DNA, 21 bp, Artificial Sequence
  Description of Artificial Sequence: Target Sequence/siNA antisense region (stab19)
  misc_feature (21)..(21): 3'-3 attached terminal deoxyabasic moiety, inverted abasic, inverted nucleotide or other terminal cap that is optionally present
  misc_feature (1)..(6): 2'-O-methyl
  misc_feature (7)..(7): 2'-deoxy-2'Fluoro
  misc_feature (8)..(10): 2'-O-methyl
  misc_feature (11)..(11): 2'-deoxy-2'Fluoro
  misc_feature (12)..(12): 2'-O-methyl
  misc_feature (13)..(14): 2'-deoxy-2'Fluoro
  misc_feature (15)..(16): 2'-O-methyl
  misc_feature (17)..(17): 2'-deoxy-2'Fluoro
  misc_feature (18)..(19): 2'-O-methyl
  misc_feature (1)..(19): ribonucleotide unmodified or modified as described for this sequence
aggagacgagcaccaacagtt

SEQ ID NO: 1632 - DNA, 21 bp, Artificial Sequence
  Description of Artificial Sequence: Target Sequence/siNA antisense region (stab22)
  misc_feature (21)..(21): 3'-3 attached terminal deoxyabasic moiety, inverted abasic, inverted nucleotide or other terminal cap that is optionally present
  misc_feature (20)..(20): Phosphorothioate or Phosphorodithioate 3'-Internucleotide Linkage (optionally present)
  misc_feature (1)..(19): ribonucleotide unmodified or modified as described for this sequence
aggagacgagcaccaacagtt

SEQ ID NO: 1633 - DNA, 21 bp, Artificial Sequence
  Description of Artificial Sequence: Target Sequence/siNA antisense region (stab25)
  misc_feature (4)..(6): 2'-O-methyl
  misc_feature (7)..(7): 2'-deoxy-2'Fluoro
  misc_feature (8)..(10): 2'-O-methyl
  misc_feature (11)..(11): 2'-deoxy-2'Fluoro
  misc_feature (12)..(12): 2'-O-methyl
  misc_feature (13)..(14): 2'-deoxy-2'Fluoro
  misc_feature (15)..(16): 2'-O-methyl
  misc_feature (17)..(17): 2'-deoxy-2'Fluoro
  misc_feature (18)..(19): 2'-O-methyl
  misc_feature (20)..(20): Phosphorothioate or Phosphorodithioate 3'-Internucleotide Linkage (optionally present)
  misc_feature (1)..(19): ribonucleotide unmodified or modified as described for this sequence
aggagacgagcaccaacagtt

SEQ ID NO: 1634 - RNA, 21 nt, Artificial Sequence
  Description of Artificial Sequence: Target Sequence/siNA antisense region (stab35)
  misc_feature (4)..(6): 2'-O-methyl
  misc_feature (7)..(7): 2'-deoxy-2'Fluoro
  misc_feature (8)..(10): 2'-O-methyl
  misc_feature (11)..(11): 2'-deoxy-2'Fluoro
  misc_feature (12)..(12): 2'-O-methyl
  misc_feature (13)..(14): 2'-deoxy-2'Fluoro
  misc_feature (15)..(16): 2'-O-methyl
  misc_feature (17)..(17): 2'-deoxy-2'Fluoro
  misc_feature (18)..(21): 2'-O-methyl
aggagacgagcaccaacaguu

SEQ ID NO: 1635 - RNA, 21 nt, Artificial Sequence
  Description of Artificial Sequence: Target Sequence/siNA antisense region (stab36)
  misc_feature (4)..(6): 2'-O-methyl
  misc_feature (7)..(7): 2'-deoxy-2'Fluoro
  misc_feature (8)..(10): 2'-O-methyl
  misc_feature (11)..(11): 2'-deoxy-2'Fluoro
  misc_feature (12)..(12): 2'-O-methyl
  misc_feature (13)..(14): 2'-deoxy-2'Fluoro
  misc_feature (15)..(16): 2'-O-methyl
  misc_feature (17)..(17): 2'-deoxy-2'Fluoro
  misc_feature (18)..(21): 2'-O-methyl
aggagacgagcaccaacagcc

SEQ ID NO: 1636 - RNA, 19 nt, Artificial Sequence
  Description of Artificial Sequence: Target Sequence/siNA sense region
uuggugcuucucuuugucu

SEQ ID NO: 1637 - RNA, 19 nt, Artificial Sequence
  Description of Artificial Sequence: Target Sequence/siNA antisense region
agacaaagagaagcaccaa

SEQ ID NO: 1638 - DNA, 21 bp, Artificial Sequence
  Description of Artificial Sequence: Target Sequence/siNA sense region (stab00)
  misc_feature (1)..(19): ribonucleotide unmodified or modified as described for this sequence
uuggugcuucucuuugucutt

SEQ ID NO: 1639 - DNA, 21 bp, Artificial Sequence
  Description of Artificial Sequence: Target Sequence/siNA antisense region (stab00as)
  misc_feature (1)..(19): ribonucleotide unmodified or modified as described for this sequence
agacaaagagaagcaccaatt

SEQ ID NO: 1640 - DNA, 21 bp, Artificial Sequence
  Description of Artificial Sequence: Target Sequence/siNA sense region (stab04)
  misc_feature (1)..(1): 5'-3 attached terminal deoxyabasic moiety, inverted abasic, inverted nucleotide or other terminal cap that is optionally present
  misc_feature (21)..(21): 3'-3 attached terminal deoxyabasic moiety, inverted abasic, inverted nucleotide or other terminal cap that is optionally present
  misc_feature (1)..(2): 2'-deoxy-2'Fluoro
  misc_feature (5)..(5): 2'-deoxy-2'Fluoro
  misc_feature (7)..(15): 2'-deoxy-2'Fluoro
  misc_feature (17)..(19): 2'-deoxy-2'Fluoro
  misc_feature (1)..(19): ribonucleotide unmodified or modified as described for this sequence
uuggugcuucucuuugucutt

SEQ ID NO: 1641 - DNA, 21 bp, Artificial Sequence
  Description of Artificial Sequence: Target Sequence/siNA antisense region (stab05)
  misc_feature (4)..(4): 2'-deoxy-2'Fluoro
  misc_feature (14)..(14): 2'-deoxy-2'Fluoro
  misc_feature (16)..(17): 2'-deoxy-2'Fluoro
  misc_feature (20)..(20): Phosphorothioate or Phosphorodithioate 3'-Internucleotide Linkage (optionally present)
  misc_feature (1)..(19): ribonucleotide unmodified or modified as described for this sequence
agacaaagagaagcaccaatt

SEQ ID NO: 1642 - DNA, 21 bp, Artificial Sequence
  Description of Artificial Sequence: Target Sequence/siNA sense region (stab07)
  misc_feature (1)..(1): 5'-3 attached terminal deoxyabasic moiety, inverted abasic, inverted nucleotide or other terminal cap that is optionally present
  misc_feature (21)..(21): 3'-3 attached terminal deoxyabasic moiety, inverted abasic, inverted nucleotide or other terminal cap that is optionally present
  misc_feature (1)..(2): 2'-deoxy-2'Fluoro
  misc_feature (5)..(5): 2'-deoxy-2'Fluoro
  misc_feature (7)..(15): 2'-deoxy-2'Fluoro
  misc_feature (17)..(19): 2'-deoxy-2'Fluoro
  misc_feature (1)..(19): ribonucleotide unmodified or modified as described for this sequence
uuggugcuucucuuugucutt

SEQ ID NO: 1643 - DNA, 21 bp, Artificial Sequence
  Description of Artificial Sequence: Target Sequence/siNA antisense region (stab08)
  misc_feature (1)..(3): 2'-O-methyl
  misc_feature (4)..(4): 2'-deoxy-2'Fluoro
  misc_feature (5)..(13): 2'-O-methyl
  misc_feature (14)..(14): 2'-deoxy-2'Fluoro
  misc_feature (15)..(15): 2'-O-methyl
  misc_feature (16)..(17): 2'-deoxy-2'Fluoro
  misc_feature (18)..(19): 2'-O-methyl
  misc_feature (20)..(20): Phosphorothioate or Phosphorodithioate 3'-Internucleotide Linkage (optionally present)
  misc_feature (1)..(19): ribonucleotide unmodified or modified as described for this sequence
agacaaagagaagcaccaatt

SEQ ID NO: 1644 - DNA, 21 bp, Artificial Sequence
  Description of Artificial Sequence: Target Sequence/siNA sense region (stab09)
  misc_feature (1)..(1): 5'-3 attached terminal deoxyabasic moiety, inverted abasic, inverted nucleotide or other terminal cap that is optionally present
  misc_feature (21)..(21): 3'-3 attached terminal deoxyabasic moiety, inverted abasic, inverted nucleotide or other terminal cap that is optionally present
  misc_feature (1)..(19): ribonucleotide unmodified or modified as described for this sequence
uuggugcuucucuuugucutt

SEQ ID NO: 1645 - DNA, 21 bp, Artificial Sequence
  Description of Artificial Sequence: Target Sequence/siNA antisense region (stab10)
  misc_feature (20)..(20): Phosphorothioate or Phosphorodithioate 3'-Internucleotide Linkage (optionally present)
  misc_feature (1)..(19): ribonucleotide unmodified or modified as described for this sequence
agacaaagagaagcaccaatt

SEQ ID NO: 1646 - DNA, 21 bp, Artificial Sequence
  Description of Artificial Sequence: Target Sequence/siNA antisense region (stab19)
  misc_feature (21)..(21): 3'-3 attached terminal deoxyabasic moiety, inverted abasic, inverted nucleotide or other terminal cap that is optionally present
  misc_feature (1)..(3): 2'-O-methyl
  misc_feature (4)..(4): 2'-deoxy-2'Fluoro
  misc_feature (5)..(13): 2'-O-methyl
  misc_feature (14)..(14): 2'-deoxy-2'Fluoro
  misc_feature (15)..(15): 2'-O-methyl
  misc_feature (16)..(17): 2'-deoxy-2'Fluoro
  misc_feature (18)..(19): 2'-O-methyl
  misc_feature (1)..(19): ribonucleotide unmodified or modified as described for this sequence
agacaaagagaagcaccaatt

SEQ ID NO: 1647 - DNA, 21 bp, Artificial Sequence
  Description of Artificial Sequence: Target Sequence/siNA antisense region (stab22)
  misc_feature (21)..(21): 3'-3 attached terminal deoxyabasic moiety, inverted abasic, inverted nucleotide or other terminal cap that is optionally present
  misc_feature (20)..(20): Phosphorothioate or Phosphorodithioate 3'-Internucleotide Linkage (optionally present)
  misc_feature (1)..(19): ribonucleotide unmodified or modified as described for this sequence
agacaaagagaagcaccaatt

SEQ ID NO: 1648 - DNA, 21 bp, Artificial Sequence
  Description of Artificial Sequence: Target Sequence/siNA antisense region (stab25)
  misc_feature (4)..(4): 2'-deoxy-2'Fluoro
  misc_feature (5)..(13): 2'-O-methyl
  misc_feature (14)..(14): 2'-deoxy-2'Fluoro
  misc_feature (15)..(15): 2'-O-methyl
  misc_feature (16)..(17): 2'-deoxy-2'Fluoro
  misc_feature (18)..(19): 2'-O-methyl
  misc_feature (20)..(20): Phosphorothioate or Phosphorodithioate 3'-Internucleotide Linkage (optionally present)
  misc_feature (1)..(19): ribonucleotide unmodified or modified as described for this sequence
agacaaagagaagcaccaatt

SEQ ID NO: 1649 - RNA, 21 nt, Artificial Sequence
  Description of Artificial Sequence: Target Sequence/siNA antisense region (stab35)
  misc_feature (4)..(4): 2'-deoxy-2'Fluoro
  misc_feature (5)..(13): 2'-O-methyl
  misc_feature (14)..(14): 2'-deoxy-2'Fluoro
  misc_feature (15)..(15): 2'-O-methyl
  misc_feature (16)..(17): 2'-deoxy-2'Fluoro
  misc_feature (18)..(21): 2'-O-methyl
agacaaagagaagcaccaauu

SEQ ID NO: 1650 - RNA, 21 nt, Artificial Sequence
  Description of Artificial Sequence: Target Sequence/siNA antisense region (stab36)
  misc_feature (4)..(4): 2'-deoxy-2'Fluoro
  misc_feature (5)..(13): 2'-O-methyl
  misc_feature (14)..(14): 2'-deoxy-2'Fluoro
  misc_feature (15)..(15): 2'-O-methyl
  misc_feature (16)..(17): 2'-deoxy-2'Fluoro
  misc_feature (18)..(21): 2'-O-methyl
agacaaagagaagcaccaagg

SEQ ID NO: 1651 - RNA, 19 nt, Artificial Sequence
  Description of Artificial Sequence: Target Sequence/siNA sense region
uacggugagccagucacac

SEQ ID NO: 1652 - RNA, 19 nt, Artificial Sequence
  Description of Artificial Sequence: Target Sequence/siNA antisense region
gugugacuggcucaccgua

SEQ ID NO: 1653 - DNA, 21 bp, Artificial Sequence
  Description of Artificial Sequence: Target Sequence/siNA sense region (stab00)
  misc_feature (1)..(19): ribonucleotide unmodified or modified as described for this sequence
uacggugagccagucacactt

SEQ ID NO: 1654 - DNA, 21 bp, Artificial Sequence
  Description of Artificial Sequence: Target Sequence/siNA antisense region (stab00as)
  misc_feature (1)..(19): ribonucleotide unmodified or modified as described for this sequence
gugugacuggcucaccguatt

SEQ ID NO: 1655 - DNA, 21 bp, Artificial Sequence
  Description of Artificial Sequence: Target Sequence/siNA sense region (stab04)
  misc_feature (1)..(1): 5'-3 attached terminal deoxyabasic moiety, inverted abasic, inverted nucleotide or other terminal cap that is optionally present
  misc_feature (21)..(21): 3'-3 attached terminal deoxyabasic moiety, inverted abasic, inverted nucleotide or other terminal cap that is optionally present
  misc_feature (1)..(1): 2'-deoxy-2'Fluoro
  misc_feature (3)..(3): 2'-deoxy-2'Fluoro
  misc_feature (6)..(6): 2'-deoxy-2'Fluoro
  misc_feature (10)..(11): 2'-deoxy-2'Fluoro
  misc_feature (14)..(15): 2'-deoxy-2'Fluoro
  misc_feature (17)..(17): 2'-deoxy-2'Fluoro
  misc_feature (19)..(19): 2'-deoxy-2'Fluoro
  misc_feature (1)..(19): ribonucleotide unmodified or modified as described for this sequence
uacggugagccagucacactt

SEQ ID NO: 1656 - DNA, 21 bp, Artificial Sequence
  Description of Artificial Sequence: Target Sequence/siNA antisense region (stab05)
  misc_feature (2)..(2): 2'-deoxy-2'Fluoro
  misc_feature (4)..(4): 2'-deoxy-2'Fluoro
  misc_feature (7)..(8): 2'-deoxy-2'Fluoro
  misc_feature (11)..(13): 2'-deoxy-2'Fluoro
  misc_feature (15)..(16): 2'-deoxy-2'Fluoro
  misc_feature (18)..(18): 2'-deoxy-2'Fluoro
  misc_feature (20)..(20): Phosphorothioate or Phosphorodithioate 3'-Internucleotide Linkage (optionally present)
  misc_feature (1)..(19): ribonucleotide unmodified or modified as described for this sequence
gugugacuggcucaccguatt

SEQ ID NO: 1657 - DNA, 21 bp, Artificial Sequence
  Description of Artificial Sequence: Target Sequence/siNA sense region (stab07)
  misc_feature (1)..(1): 5'-3 attached terminal deoxyabasic moiety, inverted abasic, inverted nucleotide or other terminal cap that is optionally present
  misc_feature (21)..(21): 3'-3 attached terminal deoxyabasic moiety, inverted abasic, inverted nucleotide or other terminal cap that is optionally present
  misc_feature (1)..(1): 2'-deoxy-2'Fluoro
  misc_feature (3)..(3): 2'-deoxy-2'Fluoro
  misc_feature (6)..(6): 2'-deoxy-2'Fluoro
  misc_feature (10)..(11): 2'-deoxy-2'Fluoro
  misc_feature (14)..(15): 2'-deoxy-2'Fluoro
  misc_feature (17)..(17): 2'-deoxy-2'Fluoro
  misc_feature (19)..(19): 2'-deoxy-2'Fluoro
  misc_feature (1)..(19): ribonucleotide unmodified or modified as described for this sequence
uacggugagccagucacactt

SEQ ID NO: 1658 - DNA, 21 bp, Artificial Sequence
  Description of Artificial Sequence: Target Sequence/siNA antisense region (stab08)
  misc_feature (1)..(1): 2'-O-methyl
  misc_feature (2)..(2): 2'-deoxy-2'Fluoro
  misc_feature (3)..(3): 2'-O-methyl
  misc_feature (4)..(4): 2'-deoxy-2'Fluoro
  misc_feature (5)..(6): 2'-O-methyl
  misc_feature (7)..(8): 2'-deoxy-2'Fluoro
  misc_feature (9)..(10): 2'-O-methyl
  misc_feature (11)..(13): 2'-deoxy-2'Fluoro
  misc_feature (14)..(14): 2'-O-methyl
  misc_feature (15)..(16): 2'-deoxy-2'Fluoro
  misc_feature (17)..(17): 2'-O-methyl
  misc_feature (18)..(18): 2'-deoxy-2'Fluoro
  misc_feature (19)..(19): 2'-O-methyl
  misc_feature (20)..(20): Phosphorothioate or Phosphorodithioate 3'-Internucleotide Linkage (optionally present)
  misc_feature (1)..(19): ribonucleotide unmodified or modified as described for this sequence
gugugacuggcucaccguatt

SEQ ID NO: 1659 - DNA, 21 bp, Artificial Sequence
  Description of Artificial Sequence: Target Sequence/siNA sense region (stab09)
  misc_feature (1)..(1): 5'-3 attached terminal deoxyabasic moiety, inverted abasic, inverted nucleotide or other terminal cap that is optionally present
  misc_feature (21)..(21): 3'-3 attached terminal deoxyabasic moiety, inverted abasic, inverted nucleotide or other terminal cap that is optionally present
  misc_feature (1)..(19): ribonucleotide unmodified or modified as described for this sequence
uacggugagccagucacactt

SEQ ID NO: 1660 - DNA, 21 bp, Artificial Sequence
  Description of Artificial Sequence: Target Sequence/siNA antisense region (stab10)
  misc_feature (20)..(20): Phosphorothioate or Phosphorodithioate 3'-Internucleotide Linkage (optionally present)
  misc_feature (1)..(19): ribonucleotide unmodified or modified as described for this sequence
gugugacuggcucaccguatt

SEQ ID NO: 1661 - DNA, 21 bp, Artificial Sequence
  Description of Artificial Sequence: Target Sequence/siNA antisense region (stab19)
  misc_feature (21)..(21): 3'-3 attached terminal deoxyabasic moiety, inverted abasic, inverted nucleotide or other terminal cap that is optionally present
  misc_feature (1)..(1): 2'-O-methyl
  misc_feature (2)..(2): 2'-deoxy-2'Fluoro
  misc_feature (3)..(3): 2'-O-methyl
  misc_feature (4)..(4): 2'-deoxy-2'Fluoro
  misc_feature (5)..(6): 2'-O-methyl
  misc_feature (7)..(8): 2'-deoxy-2'Fluoro
  misc_feature (9)..(10): 2'-O-methyl
  misc_feature (11)..(13): 2'-deoxy-2'Fluoro
  misc_feature (14)..(14): 2'-O-methyl
  misc_feature (15)..(16): 2'-deoxy-2'Fluoro
  misc_feature (17)..(17): 2'-O-methyl
  misc_feature (18)..(18): 2'-deoxy-2'Fluoro
  misc_feature (19)..(19): 2'-O-methyl
  misc_feature (1)..(19): ribonucleotide unmodified or modified as described for this sequence
gugugacuggcucaccguatt

SEQ ID NO: 1662 - DNA, 21 bp, Artificial Sequence
  Description of Artificial Sequence: Target Sequence/siNA antisense region (stab22)
  misc_feature (21)..(21): 3'-3 attached terminal deoxyabasic moiety, inverted abasic, inverted nucleotide or other terminal cap that is optionally present
  misc_feature (20)..(20): Phosphorothioate or Phosphorodithioate 3'-Internucleotide Linkage (optionally present)
  misc_feature (1)..(19): ribonucleotide unmodified or modified as described for this sequence
gugugacuggcucaccguatt

SEQ ID NO: 1663 - DNA, 21 bp, Artificial Sequence
  Description of Artificial Sequence: Target Sequence/siNA antisense region (stab25)
  misc_feature (4)..(4): 2'-deoxy-2'Fluoro
  misc_feature (5)..(6): 2'-O-methyl
  misc_feature (7)..(8): 2'-deoxy-2'Fluoro
  misc_feature (9)..(10): 2'-O-methyl
  misc_feature (11)..(13): 2'-deoxy-2'Fluoro
  misc_feature (14)..(14): 2'-O-methyl
  misc_feature (15)..(16): 2'-deoxy-2'Fluoro
  misc_feature (17)..(17): 2'-O-methyl
  misc_feature (18)..(18): 2'-deoxy-2'Fluoro
  misc_feature (19)..(19): 2'-O-methyl
  misc_feature (20)..(20): Phosphorothioate or Phosphorodithioate 3'-Internucleotide Linkage (optionally present)
  misc_feature (1)..(19): ribonucleotide unmodified or modified as described for this sequence
gugugacuggcucaccguatt

SEQ ID NO: 1664 - RNA, 21 nt, Artificial Sequence
  Description of Artificial Sequence: Target Sequence/siNA antisense region (stab35)
  misc_feature (4)..(4): 2'-deoxy-2'Fluoro
  misc_feature (5)..(6): 2'-O-methyl
  misc_feature (7)..(8): 2'-deoxy-2'Fluoro
  misc_feature (9)..(10): 2'-O-methyl
  misc_feature (11)..(13): 2'-deoxy-2'Fluoro
  misc_feature (14)..(14): 2'-O-methyl
  misc_feature (15)..(16): 2'-deoxy-2'Fluoro
  misc_feature (17)..(17): 2'-O-methyl
  misc_feature (18)..(18): 2'-deoxy-2'Fluoro
  misc_feature (19)..(21): 2'-O-methyl
gugugacuggcucaccguauu

SEQ ID NO: 1665 - RNA, 21 nt, Artificial Sequence
  Description of Artificial Sequence: Target Sequence/siNA antisense region (stab36)
  misc_feature (4)..(4): 2'-deoxy-2'Fluoro
  misc_feature (5)..(6): 2'-O-methyl
  misc_feature (7)..(8): 2'-deoxy-2'Fluoro
  misc_feature (9)..(10): 2'-O-methyl
  misc_feature (11)..(13): 2'-deoxy-2'Fluoro
  misc_feature (14)..(14): 2'-O-methyl
  misc_feature (15)..(16): 2'-deoxy-2'Fluoro
  misc_feature (17)..(17): 2'-O-methyl
  misc_feature (18)..(18): 2'-deoxy-2'Fluoro
  misc_feature (19)..(21): 2'-O-methyl
gugugacuggcucaccguaga

SEQ ID NO: 1666 - RNA, 19 nt, Artificial Sequence
  Description of Artificial Sequence: Target Sequence/siNA sense region
cggccccacucaggccccg

SEQ ID NO: 1667 - RNA, 19 nt, Artificial Sequence
  Description of Artificial Sequence: Target Sequence/siNA antisense region
cggggccugaguggggccg

SEQ ID NO: 1668 - DNA, 21 bp, Artificial Sequence
  Description of Artificial Sequence: Target Sequence/siNA sense region (stab00)
  misc_feature (1)..(19): ribonucleotide unmodified or modified as described for this sequence
cggccccacucaggccccgtt

SEQ ID NO: 1669 - DNA, 21 bp, Artificial Sequence
  Description of Artificial Sequence: Target Sequence/siNA antisense region (stab00as)
  misc_feature (1)..(19): ribonucleotide unmodified or modified as described for this sequence
cggggccugaguggggccgtt

SEQ ID NO: 1670 - DNA, 21 bp, Artificial Sequence
  Description of Artificial Sequence: Target Sequence/siNA sense region (stab04)
  misc_feature (1)..(1): 5'-3 attached terminal deoxyabasic moiety, inverted abasic, inverted nucleotide or other terminal cap that is optionally present
  misc_feature (21)..(21): 3'-3 attached terminal deoxyabasic moiety, inverted abasic, inverted nucleotide or other terminal cap that is optionally present
  misc_feature (1)..(1): 2'-deoxy-2'Fluoro
  misc_feature (4)..(7): 2'-deoxy-2'Fluoro
  misc_feature (9)..(11): 2'-deoxy-2'Fluoro
  misc_feature (15)..(18): 2'-deoxy-2'Fluoro
  misc_feature (1)..(19): ribonucleotide unmodified or modified as described for this sequence
cggccccacucaggccccgtt

SEQ ID NO: 1671 - DNA, 21 bp, Artificial Sequence
  Description of Artificial Sequence: Target Sequence/siNA antisense region (stab05)
  misc_feature (1)..(1): 2'-deoxy-2'Fluoro
  misc_feature (6)..(8): 2'-deoxy-2'Fluoro
  misc_feature (12)..(12): 2'-deoxy-2'Fluoro
  misc_feature (17)..(18): 2'-deoxy-2'Fluoro
  misc_feature (20)..(20): Phosphorothioate or Phosphorodithioate 3'-Internucleotide Linkage (optionally present)
  misc_feature (1)..(19): ribonucleotide unmodified or modified as described for this sequence
cggggccugaguggggccgtt

SEQ ID NO: 1672 - DNA, 21 bp, Artificial Sequence
  Description of Artificial Sequence: Target Sequence/siNA sense region (stab07)
  misc_feature (1)..(1): 5'-3 attached terminal deoxyabasic moiety, inverted abasic, inverted nucleotide or other terminal cap that is optionally present
  misc_feature (21)..(21): 3'-3 attached terminal deoxyabasic moiety, inverted abasic, inverted nucleotide or other terminal cap that is optionally present
  misc_feature (1)..(1): 2'-deoxy-2'Fluoro
  misc_feature (4)..(7): 2'-deoxy-2'Fluoro
  misc_feature (9)..(11): 2'-deoxy-2'Fluoro
  misc_feature (15)..(18): 2'-deoxy-2'Fluoro
  misc_feature (1)..(19): ribonucleotide unmodified or modified as described for this sequence
cggccccacucaggccccgtt

SEQ ID NO: 1673 - DNA, 21 bp, Artificial Sequence
  Description of Artificial Sequence: Target Sequence/siNA antisense region (stab08)
  misc_feature (1)..(1): 2'-deoxy-2'Fluoro
  misc_feature (2)..(5): 2'-O-methyl
  misc_feature (6)..(8): 2'-deoxy-2'Fluoro
  misc_feature (9)..(11): 2'-O-methyl
  misc_feature (12)..(12): 2'-deoxy-2'Fluoro
  misc_feature (13)..(16): 2'-O-methyl
  misc_feature (17)..(18): 2'-deoxy-2'Fluoro
  misc_feature (19)..(19): 2'-O-methyl
  misc_feature (20)..(20): Phosphorothioate or Phosphorodithioate 3'-Internucleotide Linkage (optionally present)
  misc_feature (1)..(19): ribonucleotide unmodified or modified as described for this sequence
cggggccugaguggggccgtt

SEQ ID NO: 1674 - DNA, 21 bp, Artificial Sequence
  Description of Artificial Sequence: Target Sequence/siNA sense region (stab09)
  misc_feature (1)..(1): 5'-3 attached terminal deoxyabasic moiety, inverted abasic, inverted nucleotide or other terminal cap that is optionally present
  misc_feature (21)..(21): 3'-3 attached terminal deoxyabasic moiety, inverted abasic, inverted nucleotide or other terminal cap that is optionally present
  misc_feature (1)..(19): ribonucleotide unmodified or modified as described for this sequence
cggccccacucaggccccgtt

SEQ ID NO: 1675 - DNA, 21 bp, Artificial Sequence
  Description of Artificial Sequence: Target Sequence/siNA antisense region (stab10)
  misc_feature (20)..(20): Phosphorothioate or Phosphorodithioate 3'-Internucleotide Linkage (optionally present)
  misc_feature (1)..(19): ribonucleotide unmodified or modified as described for this sequence
cggggccugaguggggccgtt

SEQ ID NO: 1676 - DNA, 21 bp, Artificial Sequence
  Description of Artificial Sequence: Target Sequence/siNA antisense region (stab19)
  misc_feature (21)..(21): 3'-3 attached terminal deoxyabasic moiety, inverted abasic, inverted nucleotide or other terminal cap that is optionally present
  misc_feature (1)..(1): 2'-deoxy-2'Fluoro
  misc_feature (2)..(5): 2'-O-methyl
  misc_feature (6)..(8): 2'-deoxy-2'Fluoro
  misc_feature (9)..(11): 2'-O-methyl
  misc_feature (12)..(12): 2'-deoxy-2'Fluoro
  misc_feature (13)..(16): 2'-O-methyl
  misc_feature (17)..(18): 2'-deoxy-2'Fluoro
  misc_feature (19)..(19): 2'-O-methyl
  misc_feature (1)..(19): ribonucleotide unmodified or modified as described for this sequence
cggggccugaguggggccgtt

SEQ ID NO: 1677 - DNA, 21 bp, Artificial Sequence
  Description of Artificial Sequence: Target Sequence/siNA antisense region (stab22)
  misc_feature (21)..(21): 3'-3 attached terminal deoxyabasic moiety, inverted abasic, inverted nucleotide or other terminal cap that is optionally present
  misc_feature (20)..(20): Phosphorothioate or Phosphorodithioate 3'-Internucleotide Linkage (optionally present)
  misc_feature (1)..(19): ribonucleotide unmodified or modified as described for this sequence
cggggccugaguggggccgtt

SEQ ID NO: 1678 - DNA, 21 bp, Artificial Sequence
  Description of Artificial Sequence: Target Sequence/siNA antisense region (stab25)
  misc_feature (4)..(5): 2'-O-methyl
  misc_feature (6)..(8): 2'-deoxy-2'Fluoro
  misc_feature (9)..(11): 2'-O-methyl
  misc_feature (12)..(12): 2'-deoxy-2'Fluoro
  misc_feature (13)..(16): 2'-O-methyl
  misc_feature (17)..(18): 2'-deoxy-2'Fluoro
  misc_feature (19)..(19): 2'-O-methyl
  misc_feature (20)..(20): Phosphorothioate or Phosphorodithioate 3'-Internucleotide Linkage (optionally present)
  misc_feature (1)..(19): ribonucleotide unmodified or modified as described for this sequence
cggggccugaguggggccgtt

SEQ ID NO: 1679 - RNA, 21 nt, Artificial Sequence
  Description of Artificial Sequence: Target Sequence/siNA antisense region (stab35)
  misc_feature (4)..(5): 2'-O-methyl
  misc_feature (6)..(8): 2'-deoxy-2'Fluoro
  misc_feature (9)..(11): 2'-O-methyl
  misc_feature (12)..(12): 2'-deoxy-2'Fluoro
  misc_feature (13)..(16): 2'-O-methyl
  misc_feature (17)..(18): 2'-deoxy-2'Fluoro
  misc_feature (19)..(21): 2'-O-methyl
cggggccugaguggggccguu

SEQ ID NO: 1680 - RNA, 21 nt, Artificial Sequence
  Description of Artificial Sequence: Target Sequence/siNA antisense region (stab36)
  misc_feature (4)..(5): 2'-O-methyl
  misc_feature (6)..(8): 2'-deoxy-2'Fluoro
  misc_feature (9)..(11): 2'-O-methyl
  misc_feature (12)..(12): 2'-deoxy-2'Fluoro
  misc_feature (13)..(16): 2'-O-methyl
  misc_feature (17)..(18): 2'-deoxy-2'Fluoro
  misc_feature (19)..(21): 2'-O-methyl
cggggccugaguggggccgug

SEQ ID NO: 1681 - RNA, 19 nt, Artificial Sequence
  Description of Artificial Sequence: Target Sequence/siNA sense region
gccguguacuucuggaggc

SEQ ID NO: 1682 - RNA, 19 nt, Artificial Sequence
  Description of Artificial Sequence: Target Sequence/siNA antisense region
gccuccagaaguacacggc

SEQ ID NO: 1683 - DNA, 21 bp, Artificial Sequence
  Description of Artificial Sequence: Target Sequence/siNA sense region (stab00)
  misc_feature (1)..(19): ribonucleotide unmodified or modified as described for this sequence
gccguguacuucuggaggctt

SEQ ID NO: 1684 - DNA, 21 bp, Artificial Sequence
  Description of Artificial Sequence: Target Sequence/siNA antisense region (stab00as)
  misc_feature (1)..(19): ribonucleotide unmodified or modified as described for this sequence
gccuccagaaguacacggctt

SEQ ID NO: 1685 - DNA, 21 bp, Artificial Sequence
  Description of Artificial Sequence: Target Sequence/siNA sense region (stab04)
  misc_feature (1)..(1): 5'-3 attached terminal deoxyabasic moiety, inverted abasic, inverted nucleotide or other terminal cap that is optionally present
  misc_feature (21)..(21): 3'-3 attached terminal deoxyabasic moiety, inverted abasic, inverted nucleotide or other terminal cap that is optionally present
  misc_feature (2)..(3): 2'-deoxy-2'Fluoro
  misc_feature (5)..(5): 2'-deoxy-2'Fluoro
  misc_feature (7)..(7): 2'-deoxy-2'Fluoro
  misc_feature (9)..(13): 2'-deoxy-2'Fluoro
  misc_feature (19)..(19): 2'-deoxy-2'Fluoro
  misc_feature (1)..(19): ribonucleotide unmodified or modified as described for this sequence
gccguguacuucuggaggctt

SEQ ID NO: 1686 - DNA, 21 bp, Artificial Sequence
  Description of Artificial Sequence: Target Sequence/siNA antisense region (stab05)
  misc_feature (2)..(6): 2'-deoxy-2'Fluoro
  misc_feature (12)..(12): 2'-deoxy-2'Fluoro
  misc_feature (14)..(14): 2'-deoxy-2'Fluoro
  misc_feature (16)..(16): 2'-deoxy-2'Fluoro
  misc_feature (19)..(19): 2'-deoxy-2'Fluoro
  misc_feature (20)..(20): Phosphorothioate or Phosphorodithioate 3'-Internucleotide Linkage (optionally present)
  misc_feature (1)..(19): ribonucleotide unmodified or modified as described for this sequence
gccuccagaaguacacggctt

SEQ ID NO: 1687 - DNA, 21 bp, Artificial Sequence
  Description of Artificial Sequence: Target Sequence/siNA sense region (stab07)
  misc_feature (1)..(1): 5'-3 attached terminal deoxyabasic moiety, inverted abasic, inverted nucleotide or other terminal cap that is optionally present
  misc_feature (21)..(21): 3'-3 attached terminal deoxyabasic moiety, inverted abasic, inverted nucleotide or other terminal cap that is optionally present
  misc_feature (2)..(3): 2'-deoxy-2'Fluoro
  misc_feature (5)..(5): 2'-deoxy-2'Fluoro
  misc_feature (7)..(7): 2'-deoxy-2'Fluoro
  misc_feature (9)..(13): 2'-deoxy-2'Fluoro
  misc_feature (19)..(19): 2'-deoxy-2'Fluoro
  misc_feature (1)..(19): ribonucleotide unmodified or modified as described for this sequence
gccguguacuucuggaggctt

SEQ ID NO: 1688 - DNA, 21 bp, Artificial Sequence
  Description of Artificial Sequence: Target Sequence/siNA antisense region (stab08)
  misc_feature (1)..(1): 2'-O-methyl
  misc_feature (2)..(6): 2'-deoxy-2'Fluoro
  misc_feature (7)..(11): 2'-O-methyl
  misc_feature (12)..(12): 2'-deoxy-2'Fluoro
  misc_feature (13)..(13): 2'-O-methyl
  misc_feature (14)..(14): 2'-deoxy-2'Fluoro
  misc_feature (15)..(15): 2'-O-methyl
  misc_feature (16)..(16): 2'-deoxy-2'Fluoro
  misc_feature (17)..(18): 2'-O-methyl
  misc_feature (19)..(19): 2'-deoxy-2'Fluoro
  misc_feature (20)..(20): Phosphorothioate or Phosphorodithioate 3'-Internucleotide Linkage (optionally present)
  misc_feature (1)..(19): ribonucleotide unmodified or modified as described for this sequence
gccuccagaaguacacggctt

SEQ ID NO: 1689 - DNA, 21 bp, Artificial Sequence
  Description of Artificial Sequence: Target Sequence/siNA sense region (stab09)
  misc_feature (1)..(1): 5'-3 attached terminal deoxyabasic moiety, inverted abasic, inverted nucleotide or other terminal cap that is optionally present
  misc_feature (21)..(21): 3'-3 attached terminal deoxyabasic moiety, inverted abasic, inverted nucleotide or other terminal cap that is optionally present
  misc_feature (1)..(19): ribonucleotide unmodified or modified as described for this sequence
gccguguacuucuggaggctt

SEQ ID NO: 1690 - DNA, 21 bp, Artificial Sequence
  Description of Artificial Sequence: Target Sequence/siNA antisense region (stab10)
  misc_feature (20)..(20): Phosphorothioate or Phosphorodithioate 3'-Internucleotide Linkage (optionally present)
  misc_feature (1)..(19): ribonucleotide unmodified or modified as described for this sequence
gccuccagaaguacacggctt

SEQ ID NO: 1691 - DNA, 21 bp, Artificial Sequence
  Description of Artificial Sequence: Target Sequence/siNA antisense region (stab19)
  misc_feature (21)..(21): 3'-3 attached terminal deoxyabasic moiety, inverted abasic, inverted nucleotide or other terminal cap that is optionally present
  misc_feature (1)..(1): 2'-O-methyl
  misc_feature (2)..(6): 2'-deoxy-2'Fluoro
  misc_feature (7)..(11): 2'-O-methyl
  misc_feature (12)..(12): 2'-deoxy-2'Fluoro
  misc_feature (13)..(13): 2'-O-methyl
  misc_feature (14)..(14): 2'-deoxy-2'Fluoro
  misc_feature (15)..(15): 2'-O-methyl
  misc_feature (16)..(16): 2'-deoxy-2'Fluoro
  misc_feature (17)..(18): 2'-O-methyl
  misc_feature (19)..(19): 2'-deoxy-2'Fluoro
  misc_feature (1)..(19): ribonucleotide unmodified or modified as described for this sequence
gccuccagaaguacacggctt

SEQ ID NO: 1692 - DNA, 21 bp, Artificial Sequence
  Description of Artificial Sequence: Target Sequence/siNA antisense region (stab22)
  misc_feature (21)..(21): 3'-3 attached terminal deoxyabasic moiety, inverted abasic, inverted nucleotide or other terminal cap that is optionally present
  misc_feature (20)..(20): Phosphorothioate or Phosphorodithioate 3'-Internucleotide Linkage (optionally present)
  misc_feature (1)..(19): ribonucleotide unmodified or modified as described for this sequence
gccuccagaaguacacggctt

SEQ ID NO: 1693 - DNA, 21 bp, Artificial Sequence
  Description of Artificial Sequence: Target Sequence/siNA antisense region (stab25)
  misc_feature (4)..(6): 2'-deoxy-2'Fluoro
  misc_feature (7)..(11): 2'-O-methyl
  misc_feature (12)..(12): 2'-deoxy-2'Fluoro
  misc_feature (13)..(13): 2'-O-methyl
  misc_feature (14)..(14): 2'-deoxy-2'Fluoro
  misc_feature (15)..(15): 2'-O-methyl
  misc_feature (16)..(16): 2'-deoxy-2'Fluoro
  misc_feature (17)..(18): 2'-O-methyl
  misc_feature (19)..(19): 2'-deoxy-2'Fluoro
  misc_feature (20)..(20): Phosphorothioate or Phosphorodithioate 3'-Internucleotide Linkage (optionally present)
  misc_feature (1)..(19): ribonucleotide unmodified or modified as described for this sequence
gccuccagaaguacacggctt

SEQ ID NO: 1694 - RNA, 21 nt, Artificial Sequence
  Description of Artificial Sequence: Target Sequence/siNA antisense region (stab35)
  misc_feature (4)..(6): 2'-deoxy-2'Fluoro
  misc_feature (7)..(11): 2'-O-methyl
  misc_feature (12)..(12): 2'-deoxy-2'Fluoro
  misc_feature (13)..(13): 2'-O-methyl
  misc_feature (14)..(14): 2'-deoxy-2'Fluoro
  misc_feature (15)..(15): 2'-O-methyl
  misc_feature (16)..(16): 2'-deoxy-2'Fluoro
  misc_feature (17)..(18): 2'-O-methyl
  misc_feature (19)..(19): 2'-deoxy-2'Fluoro
  misc_feature (20)..(21): 2'-O-methyl
gccuccagaaguacacggcuu

SEQ ID NO: 1695 - RNA, 21 nt, Artificial Sequence
  Description of Artificial Sequence: Target Sequence/siNA antisense region (stab36)
  misc_feature (4)..(6): 2'-deoxy-2'Fluoro
  misc_feature (7)..(11): 2'-O-methyl
  misc_feature (12)..(12): 2'-deoxy-2'Fluoro
  misc_feature (13)..(13): 2'-O-methyl
  misc_feature (14)..(14): 2'-deoxy-2'Fluoro
  misc_feature (15)..(15): 2'-O-methyl
  misc_feature (16)..(16): 2'-deoxy-2'Fluoro
  misc_feature (17)..(18): 2'-O-methyl
  misc_feature (19)..(19): 2'-deoxy-2'Fluoro
  misc_feature (20)..(21): 2'-O-methyl
gccuccagaaguacacggcgg

SEQ ID NO: 1696 - RNA, 19 nt, Artificial Sequence
  Description of Artificial Sequence: Target Sequence/siNA sense region
caucgcaagcaggcugacc

SEQ ID NO: 1697 - RNA, 19 nt, Artificial Sequence
  Description of Artificial Sequence: Target Sequence/siNA antisense region
ggucagccugcuugcgaug

SEQ ID NO: 1698 - DNA, 21 bp, Artificial Sequence
  Description of Artificial Sequence: Target Sequence/siNA sense region (stab00)
  misc_feature (1)..(19): ribonucleotide unmodified or modified as described for this sequence
caucgcaagcaggcugacctt

SEQ ID NO: 1699 - DNA, 21 bp, Artificial Sequence
  Description of Artificial Sequence: Target Sequence/siNA antisense region (stab00as)
  misc_feature (1)..(19): ribonucleotide unmodified or modified as described for this sequence
ggucagccugcuugcgaugtt

SEQ ID NO: 1700 - DNA, 21 bp, Artificial Sequence
  Description of Artificial Sequence: Target Sequence/siNA sense region (stab04)
  misc_feature (1)..(1): 5'-3 attached terminal deoxyabasic moiety, inverted abasic, inverted nucleotide or other terminal cap that is optionally present
  misc_feature (21)..(21): 3'-3 attached terminal deoxyabasic moiety, inverted abasic, inverted nucleotide or other terminal cap that is optionally present
  misc_feature (1)..(1): 2'-deoxy-2'Fluoro
  misc_feature (3)..(4): 2'-deoxy-2'Fluoro
  misc_feature (6)..(6): 2'-deoxy-2'Fluoro
  misc_feature (10)..(10): 2'-deoxy-2'Fluoro
  misc_feature (14)..(15): 2'-deoxy-2'Fluoro
  misc_feature (18)..(19): 2'-deoxy-2'Fluoro
  misc_feature (1)..(19): ribonucleotide unmodified or modified as described for this sequence
caucgcaagcaggcugacctt

SEQ ID NO: 1701 - DNA, 21 bp, Artificial Sequence
  Description of Artificial Sequence: Target Sequence/siNA antisense region (stab05)
  misc_feature (3)..(4): 2'-deoxy-2'Fluoro
  misc_feature (7)..(9): 2'-deoxy-2'Fluoro
  misc_feature (11)..(13): 2'-deoxy-2'Fluoro
  misc_feature (15)..(15): 2'-deoxy-2'Fluoro
  misc_feature (18)..(18): 2'-deoxy-2'Fluoro
  misc_feature (20)..(20): Phosphorothioate or Phosphorodithioate 3'-Internucleotide Linkage (optionally present)
  misc_feature (1)..(19): ribonucleotide unmodified or modified as described for this sequence
ggucagccugcuugcgaugtt

SEQ ID NO: 1702 - DNA, 21 bp, Artificial Sequence
  Description of Artificial Sequence: Target Sequence/siNA sense region (stab07)
  misc_feature (1)..(1): 5'-3 attached terminal deoxyabasic moiety, inverted abasic, inverted nucleotide or other terminal cap that is optionally present
  misc_feature (21)..(21): 3'-3 attached terminal deoxyabasic moiety, inverted abasic, inverted nucleotide or other terminal cap that is optionally present
  misc_feature (1)..(1): 2'-deoxy-2'Fluoro
  misc_feature (3)..(4): 2'-deoxy-2'Fluoro
  misc_feature (6)..(6): 2'-deoxy-2'Fluoro
  misc_feature (10)..(10): 2'-deoxy-2'Fluoro
  misc_feature (14)..(15): 2'-deoxy-2'Fluoro
  misc_feature (18)..(19): 2'-deoxy-2'Fluoro
  misc_feature (1)..(19): ribonucleotide unmodified or modified as described for this sequence
caucgcaagcaggcugacctt

SEQ ID NO: 1703 - DNA, 21 bp, Artificial Sequence
  Description of Artificial Sequence: Target Sequence/siNA antisense region (stab08)
  misc_feature (1)..(2): 2'-O-methyl
  misc_feature (3)..(4): 2'-deoxy-2'Fluoro
  misc_feature (5)..(6): 2'-O-methyl
  misc_feature (7)..(9): 2'-deoxy-2'Fluoro
  misc_feature (10)..(10): 2'-O-methyl
  misc_feature (11)..(13): 2'-deoxy-2'Fluoro
  misc_feature (14)..(14): 2'-O-methyl
  misc_feature (15)..(15): 2'-deoxy-2'Fluoro
  misc_feature (16)..(17): 2'-O-methyl
  misc_feature (18)..(18): 2'-deoxy-2'Fluoro
  misc_feature (19)..(19): 2'-O-methyl
  misc_feature (20)..(20): Phosphorothioate or Phosphorodithioate 3'-Internucleotide Linkage (optionally present)
  misc_feature (1)..(19): ribonucleotide unmodified or modified as described for this sequence
ggucagccugcuugcgaugtt

SEQ ID NO: 1704 - DNA, 21 bp, Artificial Sequence
  Description of Artificial Sequence: Target Sequence/siNA sense region (stab09)
  misc_feature (1)..(1): 5'-3 attached terminal deoxyabasic moiety, inverted abasic, inverted nucleotide or other terminal cap that is optionally present
  misc_feature (21)..(21): 3'-3 attached terminal deoxyabasic moiety, inverted abasic, inverted nucleotide or other terminal cap that is optionally present
  misc_feature (1)..(19): ribonucleotide unmodified or modified as described for this sequence
caucgcaagcaggcugacctt

SEQ ID NO: 1705 - DNA, 21 bp, Artificial Sequence
  Description of Artificial Sequence: Target Sequence/siNA antisense region (stab10)
  misc_feature (20)..(20): Phosphorothioate or Phosphorodithioate 3'-Internucleotide Linkage (optionally present)
  misc_feature (1)..(19): ribonucleotide unmodified or modified as described for this sequence
ggucagccugcuugcgaugtt

SEQ ID NO: 1706 - DNA, 21 bp, Artificial Sequence
  Description of Artificial Sequence: Target Sequence/siNA antisense region (stab19)
  misc_feature (21)..(21): 3'-3 attached terminal deoxyabasic moiety, inverted abasic, inverted nucleotide or other terminal cap that is optionally present
  misc_feature (1)..(2): 2'-O-methyl
  misc_feature (3)..(4): 2'-deoxy-2'Fluoro
  misc_feature (5)..(6): 2'-O-methyl
  misc_feature (7)..(9): 2'-deoxy-2'Fluoro
  misc_feature (10)..(10): 2'-O-methyl
  misc_feature (11)..(13): 2'-deoxy-2'Fluoro
  misc_feature (14)..(14): 2'-O-methyl
  misc_feature (15)..(15): 2'-deoxy-2'Fluoro
  misc_feature (16)..(17): 2'-O-methyl
  misc_feature (18)..(18): 2'-deoxy-2'Fluoro
  misc_feature (19)..(19): 2'-O-methyl
  misc_feature (1)..(19): ribonucleotide unmodified or modified as described for this sequence
ggucagccugcuugcgaugtt

SEQ ID NO: 1707 - DNA, 21 bp, Artificial Sequence
  Description of Artificial Sequence: Target Sequence/siNA antisense region (stab22)
  misc_feature (21)..(21): 3'-3 attached terminal deoxyabasic moiety, inverted abasic, inverted nucleotide or other terminal cap that is optionally present
  misc_feature (20)..(20): Phosphorothioate or Phosphorodithioate 3'-Internucleotide Linkage (optionally present)
  misc_feature (1)..(19): ribonucleotide unmodified or modified as described for this sequence
ggucagccugcuugcgaugtt

SEQ ID NO: 1708 - DNA, 21 bp, Artificial Sequence
  Description of Artificial Sequence: Target Sequence/siNA antisense region (stab25)
  misc_feature (4)..(4): 2'-deoxy-2'Fluoro
  misc_feature (5)..(6): 2'-O-methyl
  misc_feature (7)..(9): 2'-deoxy-2'Fluoro
  misc_feature (10)..(10): 2'-O-methyl
  misc_feature (11)..(13): 2'-deoxy-2'Fluoro
  misc_feature (14)..(14): 2'-O-methyl
  misc_feature (15)..(15): 2'-deoxy-2'Fluoro
  misc_feature (16)..(17): 2'-O-methyl
  misc_feature (18)..(18): 2'-deoxy-2'Fluoro
  misc_feature (19)..(19): 2'-O-methyl
  misc_feature (20)..(20): Phosphorothioate or Phosphorodithioate 3'-Internucleotide Linkage (optionally present)
  misc_feature (1)..(19): ribonucleotide unmodified or modified as described for this sequence
ggucagccugcuugcgaugtt

SEQ ID NO: 1709 - RNA, 21 nt, Artificial Sequence
  Description of Artificial Sequence: Target Sequence/siNA antisense region (stab35)
  misc_feature (4)..(4): 2'-deoxy-2'Fluoro
  misc_feature (5)..(6): 2'-O-methyl
  misc_feature (7)..(9): 2'-deoxy-2'Fluoro
  misc_feature (10)..(10): 2'-O-methyl
  misc_feature (11)..(13): 2'-deoxy-2'Fluoro
  misc_feature (14)..(14): 2'-O-methyl
  misc_feature (15)..(15): 2'-deoxy-2'Fluoro
  misc_feature (16)..(17): 2'-O-methyl
  misc_feature (18)..(18): 2'-deoxy-2'Fluoro
  misc_feature (19)..(21): 2'-O-methyl
ggucagccugcuugcgauguu

SEQ ID NO: 1710 - RNA, 21 nt, Artificial Sequence
  Description of Artificial Sequence: Target Sequence/siNA antisense region (stab36)
  misc_feature (4)..(4): 2'-deoxy-2'Fluoro
  misc_feature (5)..(6): 2'-O-methyl
  misc_feature (7)..(9): 2'-deoxy-2'Fluoro
  misc_feature (10)..(10): 2'-O-methyl
  misc_feature (11)..(13): 2'-deoxy-2'Fluoro
  misc_feature (14)..(14): 2'-O-methyl
  misc_feature (15)..(15): 2'-deoxy-2'Fluoro
  misc_feature (16)..(17): 2'-O-methyl
  misc_feature (18)..(18): 2'-deoxy-2'Fluoro
  misc_feature (19)..(21): 2'-O-methyl
ggucagccugcuugcgaugcc

SEQ ID NO: 1711 - RNA, 19 nt, Artificial Sequence
  Description of Artificial Sequence: Target Sequence/siNA sense region
cuggaccuggcccggggag

SEQ ID NO: 1712 - RNA, 19 nt, Artificial Sequence
  Description of Artificial Sequence: Target Sequence/siNA antisense region
cuccccgggccagguccag

SEQ ID NO: 1713 - DNA, 21 bp, Artificial Sequence
  Description of Artificial Sequence: Target Sequence/siNA sense region (stab00)
  misc_feature (1)..(19): ribonucleotide unmodified or modified as described for this sequence
cuggaccuggcccggggagtt

SEQ ID NO: 1714 - DNA, 21 bp, Artificial Sequence
  Description of Artificial Sequence: Target Sequence/siNA antisense region (stab00as)
  misc_feature (1)..(19): ribonucleotide unmodified or modified as described for this sequence
cuccccgggccagguccagtt

SEQ ID NO: 1715 - DNA, 21 bp, Artificial Sequence
  Description of Artificial Sequence: Target Sequence/siNA sense region (stab04)
  misc_feature (1)..(1): 5'-3 attached terminal deoxyabasic moiety, inverted abasic, inverted nucleotide or other terminal cap that is optionally present
  misc_feature (21)..(21): 3'-3 attached terminal deoxyabasic moiety, inverted abasic, inverted nucleotide or other terminal cap that is optionally present
  misc_feature (1)..(2): 2'-deoxy-2'Fluoro
  misc_feature (6)..(8): 2'-deoxy-2'Fluoro
  misc_feature (11)..(13): 2'-deoxy-2'Fluoro
  misc_feature (1)..(19): ribonucleotide unmodified or modified as described for this sequence
cuggaccuggcccggggagtt

SEQ ID NO: 1716 - DNA, 21 bp, Artificial Sequence
  Description of Artificial Sequence: Target Sequence/siNA antisense region (stab05)
  misc_feature (1)..(6): 2'-deoxy-2'Fluoro
  misc_feature (10)..(11): 2'-deoxy-2'Fluoro
  misc_feature (15)..(17): 2'-deoxy-2'Fluoro
  misc_feature (20)..(20): Phosphorothioate or Phosphorodithioate 3'-Internucleotide Linkage (optionally present)
  misc_feature (1)..(19): ribonucleotide unmodified or modified as described for this sequence
cuccccgggccagguccagtt

SEQ ID NO: 1717 - DNA, 21 bp, Artificial Sequence
  Description of Artificial Sequence: Target Sequence/siNA sense region (stab07)
  misc_feature (1)..(1): 5'-3 attached terminal deoxyabasic moiety, inverted abasic, inverted nucleotide or other terminal cap that is optionally present
  misc_feature (21)..(21): 3'-3 attached terminal deoxyabasic moiety, inverted abasic, inverted nucleotide or other terminal cap that is optionally present
  misc_feature (1)..(2): 2'-deoxy-2'Fluoro
  misc_feature (6)..(8): 2'-deoxy-2'Fluoro
  misc_feature (11)..(13): 2'-deoxy-2'Fluoro
  misc_feature (1)..(19): ribonucleotide unmodified or modified as described for this sequence
cuggaccuggcccggggagtt

SEQ ID NO: 1718 - DNA, 21 bp, Artificial Sequence
  Description of Artificial Sequence: Target Sequence/siNA antisense region (stab08)
  misc_feature (1)..(6): 2'-deoxy-2'Fluoro
  misc_feature (7)..(9): 2'-O-methyl
  misc_feature (10)..(11): 2'-deoxy-2'Fluoro
  misc_feature (12)..(14): 2'-O-methyl
  misc_feature (15)..(17): 2'-deoxy-2'Fluoro
  misc_feature (18)..(19): 2'-O-methyl
  misc_feature (20)..(20): Phosphorothioate or Phosphorodithioate 3'-Internucleotide Linkage (optionally present)
  misc_feature (1)..(19): ribonucleotide unmodified or modified as described for this sequence
cuccccgggccagguccagtt

SEQ ID NO: 1719 - DNA, 21 bp, Artificial Sequence
  Description of Artificial Sequence: Target Sequence/siNA sense region (stab09)
  misc_feature (1)..(1): 5'-3 attached terminal deoxyabasic moiety, inverted abasic, inverted nucleotide or other terminal cap that is optionally present
  misc_feature (21)..(21): 3'-3 attached terminal deoxyabasic moiety, inverted abasic, inverted nucleotide or other terminal cap that is optionally present
  misc_feature (1)..(19): ribonucleotide unmodified or modified as described for this sequence
cuggaccuggcccggggagtt

SEQ ID NO: 1720 - DNA, 21 bp, Artificial Sequence
  Description of Artificial Sequence: Target Sequence/siNA antisense region (stab10)
  misc_feature (20)..(20): Phosphorothioate or Phosphorodithioate 3'-Internucleotide Linkage (optionally present)
  misc_feature (1)..(19): ribonucleotide unmodified or modified as described for this sequence
cuccccgggccagguccagtt

SEQ ID NO: 1721 - DNA, 21 bp, Artificial Sequence
  Description of Artificial Sequence: Target Sequence/siNA antisense region (stab19)
  misc_feature (21)..(21): 3'-3 attached terminal deoxyabasic moiety, inverted abasic, inverted nucleotide or other terminal cap that is optionally present
  misc_feature (1)..(6): 2'-deoxy-2'Fluoro
  misc_feature (7)..(9): 2'-O-methyl
  misc_feature (10)..(11): 2'-deoxy-2'Fluoro
  misc_feature (12)..(14): 2'-O-methyl
  misc_feature (15)..(17): 2'-deoxy-2'Fluoro
  misc_feature (18)..(19): 2'-O-methyl
  misc_feature (1)..(19): ribonucleotide unmodified or modified as described for this sequence
cuccccgggccagguccagtt

SEQ ID NO: 1722 - DNA, 21 bp, Artificial Sequence
  Description of Artificial Sequence: Target Sequence/siNA antisense region (stab22)
  misc_feature (21)..(21): 3'-3 attached terminal deoxyabasic moiety, inverted abasic, inverted nucleotide or other terminal cap that is optionally present
  misc_feature (20)..(20): Phosphorothioate or Phosphorodithioate 3'-Internucleotide Linkage (optionally present)
  misc_feature (1)..(19): ribonucleotide unmodified or modified as described for this sequence
cuccccgggccagguccagtt

SEQ ID NO: 1723 - DNA, 21 bp, Artificial Sequence
  Description of Artificial Sequence: Target Sequence/siNA antisense region (stab25)
  misc_feature (4)..(6): 2'-deoxy-2'Fluoro
  misc_feature (7)..(9): 2'-O-methyl
  misc_feature (10)..(11): 2'-deoxy-2'Fluoro
  misc_feature (12)..(14): 2'-O-methyl
  misc_feature (15)..(17): 2'-deoxy-2'Fluoro
  misc_feature (18)..(19): 2'-O-methyl
  misc_feature (20)..(20): Phosphorothioate or Phosphorodithioate 3'-Internucleotide Linkage (optionally present)
  misc_feature (1)..(19): ribonucleotide unmodified or modified as described for this sequence
cuccccgggccagguccagtt

SEQ ID NO: 1724 - RNA, 21 nt, Artificial Sequence
  Description of Artificial Sequence: Target Sequence/siNA antisense region (stab35)
  misc_feature (4)..(6): 2'-deoxy-2'Fluoro
  misc_feature (7)..(9): 2'-O-methyl
  misc_feature (10)..(11): 2'-deoxy-2'Fluoro
  misc_feature (12)..(14): 2'-O-methyl
  misc_feature (15)..(17): 2'-deoxy-2'Fluoro
  misc_feature (18)..(21): 2'-O-methyl
cuccccgggccagguccaguu

SEQ ID NO: 1725 - RNA, 21 nt, Artificial Sequence
  Description of Artificial Sequence: Target Sequence/siNA antisense region (stab36)
  misc_feature (4)..(6): 2'-deoxy-2'Fluoro
  misc_feature (7)..(9): 2'-O-methyl
  misc_feature (10)..(11): 2'-deoxy-2'Fluoro
  misc_feature (12)..(14): 2'-O-methyl
  misc_feature (15)..(17): 2'-deoxy-2'Fluoro
  misc_feature (18)..(21): 2'-O-methyl
cuccccgggccagguccaggu

SEQ ID NO: 1726 - RNA, 19 nt, Artificial Sequence
  Description of Artificial Sequence: Target Sequence/siNA sense region
gacuuugcccaggcugccc

SEQ ID NO: 1727 - RNA, 19 nt, Artificial Sequence
  Description of Artificial Sequence: Target Sequence/siNA antisense region
gggcagccugggcaaaguc

SEQ ID NO: 1728 - DNA, 21 bp, Artificial Sequence
  Description of Artificial Sequence: Target Sequence/siNA sense region (stab00)
  misc_feature (1)..(19): ribonucleotide unmodified or modified as described for this sequence
gacuuugcccaggcugccctt

SEQ ID NO: 1729 - DNA, 21 bp, Artificial Sequence
  Description of Artificial Sequence: Target Sequence/siNA antisense region (stab00as)
  misc_feature (1)..(19): ribonucleotide unmodified or modified as described for this sequence
gggcagccugggcaaaguctt

SEQ ID NO: 1730 - DNA, 21 bp, Artificial Sequence
  Description of Artificial Sequence: Target Sequence/siNA sense region (stab04)
  misc_feature (1)..(1): 5'-3 attached terminal deoxyabasic moiety, inverted abasic, inverted nucleotide or other terminal cap that is optionally present
  misc_feature (21)..(21): 3'-3 attached terminal deoxyabasic moiety, inverted abasic, inverted nucleotide or other terminal cap that is optionally present
  misc_feature (3)..(6): 2'-deoxy-2'Fluoro
  misc_feature (8)..(10): 2'-deoxy-2'Fluoro
  misc_feature (14)..(15): 2'-deoxy-2'Fluoro
  misc_feature (17)..(19): 2'-deoxy-2'Fluoro
  misc_feature (1)..(19): ribonucleotide unmodified or modified as described for this sequence
gacuuugcccaggcugccctt

SEQ ID NO: 1731 - DNA, 21 bp, Artificial Sequence
  Description of Artificial Sequence: Target Sequence/siNA antisense region (stab05)
  misc_feature (4)..(4): 2'-deoxy-2'Fluoro
  misc_feature (7)..(9): 2'-deoxy-2'Fluoro
  misc_feature (13)..(13): 2'-deoxy-2'Fluoro
  misc_feature (18)..(19): 2'-deoxy-2'Fluoro
  misc_feature (20)..(20): Phosphorothioate or Phosphorodithioate 3'-Internucleotide Linkage (optionally present)
  misc_feature (1)..(19): ribonucleotide unmodified or modified as described for this sequence
gggcagccugggcaaaguctt

SEQ ID NO: 1732 - DNA, 21 bp, Artificial Sequence
  Description of Artificial Sequence: Target Sequence/siNA sense region (stab07)
  misc_feature (1)..(1): 5'-3 attached terminal deoxyabasic moiety, inverted abasic, inverted nucleotide or other terminal cap that is optionally present
  misc_feature (21)..(21): 3'-3 attached terminal deoxyabasic moiety, inverted abasic, inverted nucleotide or other terminal cap that is optionally present
  misc_feature (3)..(6): 2'-deoxy-2'Fluoro
  misc_feature (8)..(10): 2'-deoxy-2'Fluoro
  misc_feature (14)..(15): 2'-deoxy-2'Fluoro
  misc_feature (17)..(19): 2'-deoxy-2'Fluoro
  misc_feature (1)..(19): ribonucleotide unmodified or modified as described for this sequence
gacuuugcccaggcugccctt

SEQ ID NO: 1733 - DNA, 21 bp, Artificial Sequence
  Description of Artificial Sequence: Target Sequence/siNA antisense region (stab08)
  misc_feature (1)..(3): 2'-O-methyl
  misc_feature (4)..(4): 2'-deoxy-2'Fluoro
  misc_feature (5)..(6): 2'-O-methyl
  misc_feature (7)..(9): 2'-deoxy-2'Fluoro
  misc_feature (10)..(12): 2'-O-methyl
  misc_feature (13)..(13): 2'-deoxy-2'Fluoro
  misc_feature (14)..(17): 2'-O-methyl
  misc_feature (18)..(19): 2'-deoxy-2'Fluoro
  misc_feature (20)..(20): Phosphorothioate or Phosphorodithioate 3'-Internucleotide Linkage (optionally present)
  misc_feature (1)..(19): ribonucleotide unmodified or modified as described for this sequence
gggcagccugggcaaaguctt

SEQ ID NO: 1734 - DNA, 21 bp, Artificial Sequence
  Description of Artificial Sequence: Target Sequence/siNA sense region (stab09)
  misc_feature (1)..(1): 5'-3 attached terminal deoxyabasic moiety, inverted abasic, inverted nucleotide or other terminal cap that is optionally present
  misc_feature (21)..(21): 3'-3 attached terminal deoxyabasic moiety, inverted abasic, inverted nucleotide or other terminal cap that is optionally present
  misc_feature (1)..(19): ribonucleotide unmodified or modified as described for this sequence
gacuuugcccaggcugccctt

SEQ ID NO: 1735 - DNA, 21 bp, Artificial Sequence
  Description of Artificial Sequence: Target Sequence/siNA antisense region (stab10)
  misc_feature (20)..(20): Phosphorothioate or Phosphorodithioate 3'-Internucleotide Linkage (optionally present)
  misc_feature (1)..(19): ribonucleotide unmodified or modified as described for this sequence
gggcagccugggcaaaguctt

SEQ ID NO: 1736 - DNA, 21 bp, Artificial Sequence
  Description of Artificial Sequence: Target Sequence/siNA antisense region (stab19)
  misc_feature (21)..(21): 3'-3 attached terminal deoxyabasic moiety, inverted abasic, inverted nucleotide or other terminal cap that is optionally present
  misc_feature (1)..(3): 2'-O-methyl
  misc_feature (4)..(4): 2'-deoxy-2'Fluoro
  misc_feature (5)..(6): 2'-O-methyl
  misc_feature (7)..(9): 2'-deoxy-2'Fluoro
  misc_feature (10)..(12): 2'-O-methyl
  misc_feature (13)..(13): 2'-deoxy-2'Fluoro
  misc_feature (14)..(17): 2'-O-methyl
  misc_feature (18)..(19): 2'-deoxy-2'Fluoro
  misc_feature (1)..(19): ribonucleotide unmodified or modified as described for this sequence
gggcagccugggcaaaguctt

SEQ ID NO: 1737 - DNA, 21 bp, Artificial Sequence
  Description of Artificial Sequence: Target Sequence/siNA antisense region (stab22)
  misc_feature (21)..(21): 3'-3 attached terminal deoxyabasic moiety, inverted abasic, inverted nucleotide or other terminal cap that is optionally present
  misc_feature (20)..(20): Phosphorothioate or Phosphorodithioate 3'-Internucleotide Linkage (optionally present)
  misc_feature (1)..(19): ribonucleotide unmodified or modified as described for this sequence
gggcagccugggcaaaguctt

SEQ ID NO: 1738 - DNA, 21 bp, Artificial Sequence
  Description of Artificial Sequence: Target Sequence/siNA antisense region (stab25)
  misc_feature (4)..(4): 2'-deoxy-2'Fluoro
  misc_feature (5)..(6): 2'-O-methyl
  misc_feature (7)..(9): 2'-deoxy-2'Fluoro
  misc_feature (10)..(12): 2'-O-methyl
  misc_feature (13)..(13): 2'-deoxy-2'Fluoro
  misc_feature (14)..(17): 2'-O-methyl
  misc_feature (18)..(19): 2'-deoxy-2'Fluoro
  misc_feature (20)..(20): Phosphorothioate or Phosphorodithioate 3'-Internucleotide Linkage (optionally present)
  misc_feature (1)..(19): ribonucleotide unmodified or modified as described for this sequence
gggcagccugggcaaaguctt

SEQ ID NO: 1739 - RNA, 21 nt, Artificial Sequence
  Description of Artificial Sequence: Target Sequence/siNA antisense region (stab35)
  misc_feature (4)..(4): 2'-deoxy-2'Fluoro
  misc_feature (5)..(6): 2'-O-methyl
  misc_feature (7)..(9): 2'-deoxy-2'Fluoro
  misc_feature (10)..(12): 2'-O-methyl
  misc_feature (13)..(13): 2'-deoxy-2'Fluoro
  misc_feature (14)..(17): 2'-O-methyl
  misc_feature (18)..(19): 2'-deoxy-2'Fluoro
  misc_feature (20)..(21): 2'-O-methyl
gggcagccugggcaaagucuu

SEQ ID NO: 1740 - RNA, 21 nt, Artificial Sequence
  Description of Artificial Sequence: Target Sequence/siNA antisense region (stab36)
  misc_feature (4)..(4): 2'-deoxy-2'Fluoro
  misc_feature (5)..(6): 2'-O-methyl
  misc_feature (7)..(9): 2'-deoxy-2'Fluoro
  misc_feature (10)..(12): 2'-O-methyl
  misc_feature (13)..(13): 2'-deoxy-2'Fluoro
  misc_feature (14)..(17): 2'-O-methyl
  misc_feature (18)..(19): 2'-deoxy-2'Fluoro
  misc_feature (20)..(21): 2'-O-methyl
gggcagccugggcaaagucuc

SEQ ID NO: 1741 - RNA, 19 nt, Artificial Sequence
  Description of Artificial Sequence: Target Sequence/siNA sense region
cagcagcuguggcuggccc

SEQ ID NO: 1742 - RNA, 19 nt, Artificial Sequence
  Description of Artificial Sequence: Target Sequence/siNA antisense region
gggccagccacagcugcug

SEQ ID NO: 1743 - DNA, 21 bp, Artificial Sequence
  Description of Artificial Sequence: Target Sequence/siNA sense region (stab00)
  misc_feature (1)..(19): ribonucleotide unmodified or modified as described for this sequence
cagcagcuguggcuggccctt

SEQ ID NO: 1744 - DNA, 21 bp, Artificial Sequence
  Description of Artificial Sequence: Target Sequence/siNA antisense region (stab00as)
  misc_feature (1)..(19): ribonucleotide unmodified or modified as described for this sequence
gggccagccacagcugcugtt

SEQ ID NO: 1745 - DNA, 21 bp, Artificial Sequence
  Description of Artificial Sequence: Target Sequence/siNA sense region (stab04)
  misc_feature (1)..(1): 5'-3 attached terminal deoxyabasic moiety, inverted abasic, inverted nucleotide or other terminal cap that is optionally present
  misc_feature (21)..(21): 3'-3 attached terminal deoxyabasic moiety, inverted abasic, inverted nucleotide or other terminal cap that is optionally present
  misc_feature (1)..(1): 2'-deoxy-2'Fluoro
  misc_feature (4)..(4): 2'-deoxy-2'Fluoro
  misc_feature (7)..(8): 2'-deoxy-2'Fluoro
  misc_feature (10)..(10): 2'-deoxy-2'Fluoro
  misc_feature (13)..(14): 2'-deoxy-2'Fluoro
  misc_feature (17)..(19): 2'-deoxy-2'Fluoro
  misc_feature (1)..(19): ribonucleotide unmodified or modified as described for this sequence
cagcagcuguggcuggccctt

SEQ ID NO: 1746 - DNA, 21 bp, Artificial Sequence
  Description of Artificial Sequence: Target Sequence/siNA antisense region (stab05)
  misc_feature (4)..(5): 2'-deoxy-2'Fluoro
  misc_feature (8)..(9): 2'-deoxy-2'Fluoro
  misc_feature (11)..(11): 2'-deoxy-2'Fluoro
  misc_feature (14)..(15): 2'-deoxy-2'Fluoro
  misc_feature (17)..(18): 2'-deoxy-2'Fluoro
  misc_feature (20)..(20): Phosphorothioate or Phosphorodithioate 3'-Internucleotide Linkage (optionally present)
  misc_feature (1)..(19): ribonucleotide unmodified or modified as described for this sequence
gggccagccacagcugcugtt

SEQ ID NO: 1747 - DNA, 21 bp, Artificial Sequence
  Description of Artificial Sequence: Target Sequence/siNA sense region (stab07)
  misc_feature (1)..(1): 5'-3 attached terminal deoxyabasic moiety, inverted abasic, inverted nucleotide or other terminal cap that is optionally present
  misc_feature (21)..(21): 3'-3 attached terminal deoxyabasic moiety, inverted abasic, inverted nucleotide or other terminal cap that is optionally present
  misc_feature (1)..(1): 2'-deoxy-2'Fluoro
  misc_feature (4)..(4): 2'-deoxy-2'Fluoro
  misc_feature (7)..(8): 2'-deoxy-2'Fluoro
  misc_feature (10)..(10): 2'-deoxy-2'Fluoro
  misc_feature (13)..(14): 2'-deoxy-2'Fluoro
  misc_feature (17)..(19): 2'-deoxy-2'Fluoro
  misc_feature (1)..(19): ribonucleotide unmodified or modified as described for this sequence
cagcagcuguggcuggccctt

SEQ ID NO: 1748 - DNA, 21 bp, Artificial Sequence
  Description of Artificial Sequence: Target Sequence/siNA antisense region (stab08)
  misc_feature (1)..(3): 2'-O-methyl
  misc_feature (4)..(5): 2'-deoxy-2'Fluoro
  misc_feature (6)..(7): 2'-O-methyl
  misc_feature (8)..(9): 2'-deoxy-2'Fluoro
  misc_feature (10)..(10): 2'-O-methyl
  misc_feature (11)..(11): 2'-deoxy-2'Fluoro
  misc_feature (12)..(13): 2'-O-methyl
  misc_feature (14)..(15): 2'-deoxy-2'Fluoro
  misc_feature (16)..(16): 2'-O-methyl
  misc_feature (17)..(18): 2'-deoxy-2'Fluoro
  misc_feature (19)..(19): 2'-O-methyl
  misc_feature (20)..(20): Phosphorothioate or Phosphorodithioate 3'-Internucleotide Linkage (optionally present)
  misc_feature (1)..(19): ribonucleotide unmodified or modified as described for this sequence
gggccagccacagcugcugtt

SEQ ID NO: 1749 - DNA, 21 bp, Artificial Sequence
  Description of Artificial Sequence: Target Sequence/siNA sense region (stab09)
  misc_feature (1)..(1): 5'-3 attached terminal deoxyabasic moiety, inverted abasic, inverted nucleotide or other terminal cap that is optionally present
  misc_feature (21)..(21): 3'-3 attached terminal deoxyabasic moiety, inverted abasic, inverted nucleotide or other terminal cap that is optionally present
  misc_feature (1)..(19): ribonucleotide unmodified or modified as described for this sequence
cagcagcuguggcuggccctt

SEQ ID NO: 1750 - DNA, 21 bp, Artificial Sequence
  Description of Artificial Sequence: Target Sequence/siNA antisense region (stab10)
  misc_feature (20)..(20): Phosphorothioate or Phosphorodithioate 3'-Internucleotide Linkage (optionally present)
  misc_feature (1)..(19): ribonucleotide unmodified or modified as described for this sequence
gggccagccacagcugcugtt

SEQ ID NO: 1751 - DNA, 21 bp, Artificial Sequence
  Description of Artificial Sequence: Target Sequence/siNA antisense region (stab19)
  misc_feature (21)..(21): 3'-3 attached terminal deoxyabasic moiety, inverted abasic, inverted nucleotide or other terminal cap that is optionally present
  misc_feature (1)..(3): 2'-O-methyl
  misc_feature (4)..(5): 2'-deoxy-2'Fluoro
  misc_feature (6)..(7): 2'-O-methyl
  misc_feature (8)..(9): 2'-deoxy-2'Fluoro
  misc_feature (10)..(10): 2'-O-methyl
  misc_feature (11)..(11): 2'-deoxy-2'Fluoro
  misc_feature (12)..(13): 2'-O-methyl
  misc_feature (14)..(15): 2'-deoxy-2'Fluoro
  misc_feature (16)..(16): 2'-O-methyl
  misc_feature (17)..(18): 2'-deoxy-2'Fluoro
  misc_feature (19)..(19): 2'-O-methyl
  misc_feature (1)..(19): ribonucleotide unmodified or modified as described for this sequence
gggccagccacagcugcugtt

SEQ ID NO: 1752 - DNA, 21 bp, Artificial Sequence
  Description of Artificial Sequence: Target Sequence/siNA antisense region (stab22)
  misc_feature (21)..(21): 3'-3 attached terminal deoxyabasic moiety, inverted abasic, inverted nucleotide or other terminal cap that is optionally present
  misc_feature (20)..(20): Phosphorothioate or Phosphorodithioate 3'-Internucleotide Linkage (optionally present)
  misc_feature (1)..(19): ribonucleotide unmodified or modified as described for this sequence
gggccagccacagcugcugtt

SEQ ID NO: 1753 - DNA, 21 bp, Artificial Sequence
  Description of Artificial Sequence: Target Sequence/siNA antisense region (stab25)
  misc_feature (4)..(5): 2'-deoxy-2'Fluoro
  misc_feature (6)..(7): 2'-O-methyl
  misc_feature (8)..(9): 2'-deoxy-2'Fluoro
  misc_feature (10)..(10): 2'-O-methyl
  misc_feature (11)..(11): 2'-deoxy-2'Fluoro
  misc_feature (12)..(13): 2'-O-methyl
  misc_feature (14)..(15): 2'-deoxy-2'Fluoro
  misc_feature (16)..(16): 2'-O-methyl
  misc_feature (17)..(18): 2'-deoxy-2'Fluoro
  misc_feature (19)..(19): 2'-O-methyl
  misc_feature (20)..(20): Phosphorothioate or Phosphorodithioate 3'-Internucleotide Linkage (optionally present)
  misc_feature (1)..(19): ribonucleotide unmodified or modified as described for this sequence
gggccagccacagcugcugtt

SEQ ID NO: 1754 - RNA, 21 nt, Artificial Sequence
  Description of Artificial Sequence: Target Sequence/siNA antisense region (stab35)
  misc_feature (4)..(5): 2'-deoxy-2'Fluoro
  misc_feature (6)..(7): 2'-O-methyl
  misc_feature (8)..(9): 2'-deoxy-2'Fluoro
  misc_feature (10)..(10): 2'-O-methyl
  misc_feature (11)..(11): 2'-deoxy-2'Fluoro
  misc_feature (12)..(13): 2'-O-methyl
  misc_feature (14)..(15): 2'-deoxy-2'Fluoro
  misc_feature (16)..(16): 2'-O-methyl
  misc_feature (17)..(18): 2'-deoxy-2'Fluoro
  misc_feature (19)..(21): 2'-O-methyl
gggccagccacagcugcuguu

SEQ ID NO: 1755 - RNA, 21 nt, Artificial Sequence
  Description of Artificial Sequence: Target Sequence/siNA antisense region (stab36)
  misc_feature (4)..(5): 2'-deoxy-2'Fluoro
  misc_feature (6)..(7): 2'-O-methyl
  misc_feature (8)..(9): 2'-deoxy-2'Fluoro
  misc_feature (10)..(10): 2'-O-methyl
  misc_feature (11)..(11): 2'-deoxy-2'Fluoro
  misc_feature (12)..(13): 2'-O-methyl
  misc_feature (14)..(15): 2'-deoxy-2'Fluoro
  misc_feature (16)..(16): 2'-O-methyl
  misc_feature (17)..(18): 2'-deoxy-2'Fluoro
  misc_feature (19)..(21): 2'-O-methyl
gggccagccacagcugcuggg

SEQ ID NO: 1756 - RNA, 19 nt, Artificial Sequence
  Description of Artificial Sequence: Target Sequence/siNA sense region
cugcgggcacugggccggc

SEQ ID NO: 1757 - RNA, 19 nt, Artificial Sequence
  Description of Artificial Sequence: Target Sequence/siNA antisense region
gccggcccagugcccgcag

SEQ ID NO: 1758 - DNA, 21 bp, Artificial Sequence
  Description of Artificial Sequence: Target Sequence/siNA sense region (stab00)
  misc_feature (1)..(19): ribonucleotide unmodified or modified as described for this sequence
cugcgggcacugggccggctt

SEQ ID NO: 1759 - DNA, 21 bp, Artificial Sequence
  Description of Artificial Sequence: Target Sequence/siNA antisense region (stab00as)
  misc_feature (1)..(19): ribonucleotide unmodified or modified as described for this sequence
gccggcccagugcccgcagtt

SEQ ID NO: 1760 - DNA, 21 bp, Artificial Sequence
  Description of Artificial Sequence: Target Sequence/siNA sense region (stab04)
  misc_feature (1)..(1): 5'-3 attached terminal deoxyabasic moiety, inverted abasic, inverted nucleotide or other terminal cap that is optionally present
  misc_feature (21)..(21): 3'-3 attached terminal deoxyabasic moiety, inverted abasic, inverted nucleotide or other terminal cap that is optionally present
  misc_feature (1)..(2): 2'-deoxy-2'Fluoro
  misc_feature (4)..(4): 2'-deoxy-2'Fluoro
  misc_feature (8)..(8): 2'-deoxy-2'Fluoro
  misc_feature (10)..(11): 2'-deoxy-2'Fluoro
  misc_feature (15)..(16): 2'-deoxy-2'Fluoro
  misc_feature (19)..(19): 2'-deoxy-2'Fluoro
  misc_feature (1)..(19): ribonucleotide unmodified or modified as described for this sequence
cugcgggcacugggccggctt

SEQ ID NO: 1761 - DNA, 21 bp, Artificial Sequence
  Description of Artificial Sequence: Target Sequence/siNA antisense region (stab05)
  misc_feature (2)..(3): 2'-deoxy-2'Fluoro
  misc_feature (6)..(8): 2'-deoxy-2'Fluoro
  misc_feature (11)..(11): 2'-deoxy-2'Fluoro
  misc_feature (13)..(15): 2'-deoxy-2'Fluoro
  misc_feature (17)..(17): 2'-deoxy-2'Fluoro
  misc_feature (20)..(20): Phosphorothioate or Phosphorodithioate 3'-Internucleotide Linkage (optionally present)
  misc_feature (1)..(19): ribonucleotide unmodified or modified as described for this sequence
gccggcccagugcccgcagtt

SEQ ID NO: 1762 - DNA, 21 bp, Artificial Sequence
  Description of Artificial Sequence: Target Sequence/siNA sense region (stab07)
  misc_feature (1)..(1): 5'-3 attached terminal deoxyabasic moiety, inverted abasic, inverted nucleotide or other terminal cap that is optionally present
  misc_feature (21)..(21): 3'-3 attached terminal deoxyabasic moiety, inverted abasic, inverted nucleotide or other terminal cap that is optionally present
  misc_feature (1)..(2): 2'-deoxy-2'Fluoro
  misc_feature (4)..(4): 2'-deoxy-2'Fluoro
  misc_feature (8)..(8): 2'-deoxy-2'Fluoro
  misc_feature (10)..(11): 2'-deoxy-2'Fluoro
  misc_feature (15)..(16): 2'-deoxy-2'Fluoro
  misc_feature (19)..(19): 2'-deoxy-2'Fluoro
  misc_feature (1)..(19): ribonucleotide unmodified or modified as described for this sequence
cugcgggcacugggccggctt

SEQ ID NO: 1763 - DNA, 21 bp, Artificial Sequence
  Description of Artificial Sequence: Target Sequence/siNA antisense region (stab08)
  misc_feature (1)..(1): 2'-O-methyl
  misc_feature (2)..(3): 2'-deoxy-2'Fluoro
  misc_feature (4)..(5): 2'-O-methyl
  misc_feature (6)..(8): 2'-deoxy-2'Fluoro
  misc_feature (9)..(10): 2'-O-methyl
  misc_feature (11)..(11): 2'-deoxy-2'Fluoro
  misc_feature (12)..(12): 2'-O-methyl
  misc_feature (13)..(15): 2'-deoxy-2'Fluoro
  misc_feature (16)..(16): 2'-O-methyl
  misc_feature (17)..(17): 2'-deoxy-2'Fluoro
  misc_feature (18)..(19): 2'-O-methyl
  misc_feature (20)..(20): Phosphorothioate or Phosphorodithioate 3'-Internucleotide Linkage (optionally present)
  misc_feature (1)..(19): ribonucleotide unmodified or modified as described for this sequence
gccggcccagugcccgcagtt

SEQ ID NO: 1764 - DNA, 21 bp, Artificial Sequence
  Description of Artificial Sequence: Target Sequence/siNA sense region (stab09)
  misc_feature (1)..(1): 5'-3 attached terminal deoxyabasic moiety, inverted abasic, inverted nucleotide or other terminal cap that is optionally present
  misc_feature (21)..(21): 3'-3 attached terminal deoxyabasic moiety, inverted abasic, inverted nucleotide or other terminal cap that is optionally present
  misc_feature (1)..(19): ribonucleotide unmodified or modified as described for this sequence
cugcgggcacugggccggctt

SEQ ID NO: 1765 - DNA, 21 bp, Artificial Sequence
  Description of Artificial Sequence: Target Sequence/siNA antisense region (stab10)
  misc_feature (20)..(20): Phosphorothioate or Phosphorodithioate 3'-Internucleotide Linkage (optionally present)
  misc_feature (1)..(19): ribonucleotide unmodified or modified as described for this sequence
gccggcccagugcccgcagtt

SEQ ID NO: 1766 - DNA, 21 bp, Artificial Sequence
  Description of Artificial Sequence: Target Sequence/siNA antisense region (stab19)
  misc_feature (21)..(21): 3'-3 attached terminal deoxyabasic moiety, inverted abasic, inverted nucleotide or other terminal cap that is optionally present
  misc_feature (1)..(1): 2'-O-methyl
  misc_feature (2)..(3): 2'-deoxy-2'Fluoro
  misc_feature (4)..(5): 2'-O-methyl
  misc_feature (6)..(8): 2'-deoxy-2'Fluoro
  misc_feature (9)..(10): 2'-O-methyl
  misc_feature (11)..(11): 2'-deoxy-2'Fluoro
  misc_feature (12)..(12): 2'-O-methyl
  misc_feature (13)..(15): 2'-deoxy-2'Fluoro
  misc_feature (16)..(16): 2'-O-methyl
  misc_feature (17)..(17): 2'-deoxy-2'Fluoro
  misc_feature (18)..(19): 2'-O-methyl
  misc_feature (1)..(19): ribonucleotide unmodified or modified as described for this sequence
gccggcccagugcccgcagtt

SEQ ID NO: 1767 - DNA, 21 bp, Artificial Sequence
  Description of Artificial Sequence: Target Sequence/siNA antisense region (stab22)
  misc_feature (21)..(21): 3'-3 attached terminal deoxyabasic moiety, inverted abasic, inverted nucleotide or other terminal cap that is optionally present
  misc_feature (20)..(20): Phosphorothioate or Phosphorodithioate 3'-Internucleotide Linkage (optionally present)
  misc_feature (1)..(19): ribonucleotide unmodified or modified as described for this sequence
gccggcccagugcccgcagtt

SEQ ID NO: 1768 - DNA, 21 bp, Artificial Sequence
  Description of Artificial Sequence: Target Sequence/siNA antisense region (stab25)
  misc_feature (4)..(5): 2'-O-methyl
  misc_feature (6)..(8): 2'-deoxy-2'Fluoro
  misc_feature (9)..(10): 2'-O-methyl
  misc_feature (11)..(11): 2'-deoxy-2'Fluoro
  misc_feature (12)..(12): 2'-O-methyl
  misc_feature (13)..(15): 2'-deoxy-2'Fluoro
  misc_feature (16)..(16): 2'-O-methyl
  misc_feature (17)..(17): 2'-deoxy-2'Fluoro
  misc_feature (18)..(19): 2'-O-methyl
  misc_feature (20)..(20): Phosphorothioate or Phosphorodithioate 3'-Internucleotide Linkage (optionally present)
  misc_feature (1)..(19): ribonucleotide unmodified or modified as described for this sequence
gccggcccagugcccgcagtt

SEQ ID NO: 1769 - RNA, 21 nt, Artificial Sequence
  Description of Artificial Sequence: Target Sequence/siNA antisense region (stab35)
  misc_feature (4)..(5): 2'-O-methyl
  misc_feature (6)..(8): 2'-deoxy-2'Fluoro
  misc_feature (9)..(10): 2'-O-methyl
  misc_feature (11)..(11): 2'-deoxy-2'Fluoro
  misc_feature (12)..(12): 2'-O-methyl
  misc_feature (13)..(15): 2'-deoxy-2'Fluoro
  misc_feature (16)..(16): 2'-O-methyl
  misc_feature (17)..(17): 2'-deoxy-2'Fluoro
  misc_feature (18)..(21): 2'-O-methyl
gccggcccagugcccgcaguu

SEQ ID NO: 1770 - RNA, 21 nt, Artificial Sequence
  Description of Artificial Sequence: Target Sequence/siNA antisense region (stab36)
  misc_feature (4)..(5): 2'-O-methyl
  misc_feature (6)..(8): 2'-deoxy-2'Fluoro
  misc_feature (9)..(10): 2'-O-methyl
  misc_feature (11)..(11): 2'-deoxy-2'Fluoro
  misc_feature (12)..(12): 2'-O-methyl
  misc_feature (13)..(15): 2'-deoxy-2'Fluoro
  misc_feature (16)..(16): 2'-O-methyl
  misc_feature (17)..(17): 2'-deoxy-2'Fluoro
  misc_feature (18)..(21): 2'-O-methyl
gccggcccagugcccgcaggg

SEQ ID NO: 1771 - RNA, 19 nt, Artificial Sequence
  Description of Artificial Sequence: Target Sequence/siNA sense region
ccccugcccaccucccacc

SEQ ID NO: 1772 - RNA, 19 nt, Artificial Sequence
  Description of Artificial Sequence: Target Sequence/siNA antisense region
ggugggaggugggcagggg

SEQ ID NO: 1773 - DNA, 21 bp, Artificial Sequence
  Description of Artificial Sequence: Target Sequence/siNA sense region (stab00)
  misc_feature (1)..(19): ribonucleotide unmodified or modified as described for this sequence
ccccugcccaccucccacctt

SEQ ID NO: 1774 - DNA, 21 bp, Artificial Sequence
  Description of Artificial Sequence: Target Sequence/siNA antisense region (stab00as)
  misc_feature (1)..(19): ribonucleotide unmodified or modified as described for this sequence
ggugggaggugggcaggggtt

SEQ ID NO: 1775 - DNA, 21 bp, Artificial Sequence
  Description of Artificial Sequence: Target Sequence/siNA sense region (stab04)
  misc_feature (1)..(1): 5'-3 attached terminal deoxyabasic moiety, inverted abasic, inverted nucleotide or other terminal cap that is optionally present
  misc_feature (21)..(21): 3'-3 attached terminal deoxyabasic moiety, inverted abasic, inverted nucleotide or other terminal cap that is optionally present
  misc_feature (1)..(5): 2'-deoxy-2'Fluoro
  misc_feature (7)..(9): 2'-deoxy-2'Fluoro
  misc_feature (11)..(16): 2'-deoxy-2'Fluoro
  misc_feature (18)..(19): 2'-deoxy-2'Fluoro
  misc_feature (1)..(19): ribonucleotide unmodified or modified as described for this sequence
ccccugcccaccucccacctt

SEQ ID NO: 1776 - DNA, 21 bp, Artificial Sequence
  Description of Artificial Sequence: Target Sequence/siNA antisense region (stab05)
  misc_feature (3)..(3): 2'-deoxy-2'Fluoro
  misc_feature (10)..(10): 2'-deoxy-2'Fluoro
  misc_feature (14)..(14): 2'-deoxy-2'Fluoro
  misc_feature (20)..(20): Phosphorothioate or Phosphorodithioate 3'-Internucleotide Linkage (optionally present)
  misc_feature (1)..(19): ribonucleotide unmodified or modified as described for this sequence
ggugggaggugggcaggggtt

SEQ ID NO: 1777 - DNA, 21 bp, Artificial Sequence
  Description of Artificial Sequence: Target Sequence/siNA sense region (stab07)
  misc_feature (1)..(1): 5'-3 attached terminal deoxyabasic moiety, inverted abasic, inverted nucleotide or other terminal cap that is optionally present
  misc_feature (21)..(21): 3'-3 attached terminal deoxyabasic moiety, inverted abasic, inverted nucleotide or other terminal cap that is optionally present
  misc_feature (1)..(5): 2'-deoxy-2'Fluoro
  misc_feature (7)..(9): 2'-deoxy-2'Fluoro
  misc_feature (11)..(16): 2'-deoxy-2'Fluoro
  misc_feature (18)..(19): 2'-deoxy-2'Fluoro
  misc_feature (1)..(19): ribonucleotide unmodified or modified as described for this sequence
ccccugcccaccucccacctt

SEQ ID NO: 1778 - DNA, 21 bp, Artificial Sequence
  Description of Artificial Sequence: Target Sequence/siNA antisense region (stab08)
  misc_feature (1)..(2): 2'-O-methyl
  misc_feature (3)..(3): 2'-deoxy-2'Fluoro
  misc_feature (4)..(9): 2'-O-methyl
  misc_feature (10)..(10): 2'-deoxy-2'Fluoro
  misc_feature (11)..(13): 2'-O-methyl
  misc_feature (14)..(14): 2'-deoxy-2'Fluoro
  misc_feature (15)..(19): 2'-O-methyl
  misc_feature (20)..(20): Phosphorothioate or Phosphorodithioate 3'-Internucleotide Linkage (optionally present)
  misc_feature (1)..(19): ribonucleotide unmodified or modified as described for this sequence
ggugggaggugggcaggggtt

SEQ ID NO: 1779 - DNA, 21 bp, Artificial Sequence
  Description of Artificial Sequence: Target Sequence/siNA sense region (stab09)
  misc_feature (1)..(1): 5'-3 attached terminal deoxyabasic moiety, inverted abasic, inverted nucleotide or other terminal cap that is optionally present
  misc_feature (21)..(21): 3'-3 attached terminal deoxyabasic moiety, inverted abasic, inverted nucleotide or other terminal cap that is optionally present
  misc_feature (1)..(19): ribonucleotide unmodified or modified as described for this sequence
ccccugcccaccucccacctt

SEQ ID NO: 1780 - DNA, 21 bp, Artificial Sequence
  Description of Artificial Sequence: Target Sequence/siNA antisense region (stab10)
  misc_feature (20)..(20): Phosphorothioate or Phosphorodithioate 3'-Internucleotide Linkage (optionally present)
  misc_feature (1)..(19): ribonucleotide unmodified or modified as described for this sequence
ggugggaggugggcaggggtt

SEQ ID NO: 1781 - DNA, 21 bp, Artificial Sequence
  Description of Artificial Sequence: Target Sequence/siNA antisense region (stab19)
  misc_feature (21)..(21): 3'-3 attached terminal deoxyabasic moiety, inverted abasic, inverted nucleotide or other terminal cap that is optionally present
  misc_feature (1)..(2): 2'-O-methyl
  misc_feature (3)..(3): 2'-deoxy-2'Fluoro
  misc_feature (4)..(9): 2'-O-methyl
  misc_feature (10)..(10): 2'-deoxy-2'Fluoro
  misc_feature (11)..(13): 2'-O-methyl
  misc_feature (14)..(14): 2'-deoxy-2'Fluoro
  misc_feature (15)..(19): 2'-O-methyl
  misc_feature (1)..(19): ribonucleotide unmodified or modified as described for this sequence
ggugggaggugggcaggggtt

SEQ ID NO: 1782 - DNA, 21 bp, Artificial Sequence
  Description of Artificial Sequence: Target Sequence/siNA antisense region (stab22)
  misc_feature (21)..(21): 3'-3 attached terminal deoxyabasic moiety, inverted abasic, inverted nucleotide or other terminal cap that is optionally present
  misc_feature (20)..(20): Phosphorothioate or Phosphorodithioate 3'-Internucleotide Linkage (optionally present)
  misc_feature (1)..(19): ribonucleotide unmodified or modified as described for this sequence
ggugggaggugggcaggggtt

SEQ ID NO: 1783 - DNA, 21 bp, Artificial Sequence
  Description of Artificial Sequence: Target Sequence/siNA antisense region (stab25)
  misc_feature (4)..(9): 2'-O-methyl
  misc_feature (10)..(10): 2'-deoxy-2'Fluoro
  misc_feature (11)..(13): 2'-O-methyl
  misc_feature (14)..(14): 2'-deoxy-2'Fluoro
  misc_feature (15)..(19): 2'-O-methyl
  misc_feature (20)..(20): Phosphorothioate or Phosphorodithioate 3'-Internucleotide Linkage (optionally present)
  misc_feature (1)..(19): ribonucleotide unmodified or modified as described for this sequence
ggugggaggugggcaggggtt

SEQ ID NO: 1784 - RNA, 21 nt, Artificial Sequence
  Description of Artificial Sequence: Target Sequence/siNA antisense region (stab35)
  misc_feature (4)..(9): 2'-O-methyl
  misc_feature (10)..(10): 2'-deoxy-2'Fluoro
  misc_feature (11)..(13): 2'-O-methyl
  misc_feature (14)..(14): 2'-deoxy-2'Fluoro
  misc_feature (15)..(21): 2'-O-methyl
ggugggaggugggcagggguu

SEQ ID NO: 1785 - RNA, 21 nt, Artificial Sequence
  Description of Artificial Sequence: Target Sequence/siNA antisense region (stab36)
  misc_feature (4)..(9): 2'-O-methyl
  misc_feature (10)..(10): 2'-deoxy-2'Fluoro
  misc_feature (11)..(13): 2'-O-methyl
  misc_feature (14)..(14): 2'-deoxy-2'Fluoro
  misc_feature (15)..(21): 2'-O-methyl
ggugggaggugggcaggggcc

SEQ ID NO: 1786 - RNA, 19 nt, Artificial Sequence
  Description of Artificial Sequence: Target Sequence/siNA sense region
cuggaccuggcuuguagcc

SEQ ID NO: 1787 - RNA, 19 nt, Artificial Sequence
  Description of Artificial Sequence: Target Sequence/siNA antisense region
ggcuacaagccagguccag

SEQ ID NO: 1788 - DNA, 21 bp, Artificial Sequence
  Description of Artificial Sequence: Target Sequence/siNA sense region (stab00)
  misc_feature (1)..(19): ribonucleotide unmodified or modified as described for this sequence
cuggaccuggcuuguagcctt

SEQ ID NO: 1789 - DNA, 21 bp, Artificial Sequence
  Description of Artificial Sequence: Target Sequence/siNA antisense region (stab00as)
  misc_feature (1)..(19): ribonucleotide unmodified or modified as described for this sequence
ggcuacaagccagguccagtt

SEQ ID NO: 1790 - DNA, 21 bp, Artificial Sequence
  Description of Artificial Sequence: Target Sequence/siNA sense region (stab04)
  misc_feature (1)..(1): 5'-3 attached terminal deoxyabasic moiety, inverted abasic, inverted nucleotide or other terminal cap that is optionally present
  misc_feature (21)..(21): 3'-3 attached terminal deoxyabasic moiety, inverted abasic, inverted nucleotide or other terminal cap that is optionally present
  misc_feature (1)..(2): 2'-deoxy-2'Fluoro
  misc_feature (6)..(8): 2'-deoxy-2'Fluoro
  misc_feature (11)..(13): 2'-deoxy-2'Fluoro
  misc_feature (15)..(15): 2'-deoxy-2'Fluoro
  misc_feature (18)..(19): 2'-deoxy-2'Fluoro
  misc_feature (1)..(19): ribonucleotide unmodified or modified as described for this sequence
cuggaccuggcuuguagcctt

SEQ ID NO: 1791 - DNA, 21 bp, Artificial Sequence
  Description of Artificial Sequence: Target Sequence/siNA antisense region (stab05)
  misc_feature (3)..(4): 2'-deoxy-2'Fluoro
  misc_feature (6)..(6): 2'-deoxy-2'Fluoro
  misc_feature (10)..(11): 2'-deoxy-2'Fluoro
  misc_feature (15)..(17): 2'-deoxy-2'Fluoro
  misc_feature (20)..(20): Phosphorothioate or Phosphorodithioate 3'-Internucleotide Linkage (optionally present)
  misc_feature (1)..(19): ribonucleotide unmodified or modified as described for this sequence
ggcuacaagccagguccagtt

SEQ ID NO: 1792 - DNA, 21 bp, Artificial Sequence
  Description of Artificial Sequence: Target Sequence/siNA sense region (stab07)
  misc_feature (1)..(1): 5'-3 attached terminal deoxyabasic moiety, inverted abasic, inverted nucleotide or other terminal cap that is optionally present
  misc_feature (21)..(21): 3'-3 attached terminal deoxyabasic moiety, inverted abasic, inverted nucleotide or other terminal cap that is optionally present
  misc_feature (1)..(2): 2'-deoxy-2'Fluoro
  misc_feature (6)..(8): 2'-deoxy-2'Fluoro
  misc_feature (11)..(13): 2'-deoxy-2'Fluoro
  misc_feature (15)..(15): 2'-deoxy-2'Fluoro
  misc_feature (18)..(19): 2'-deoxy-2'Fluoro
  misc_feature (1)..(19): ribonucleotide unmodified or modified as described for this sequence
cuggaccuggcuuguagcctt

SEQ ID NO: 1793 - DNA, 21 bp, Artificial Sequence
  Description of Artificial Sequence: Target Sequence/siNA antisense region (stab08)
  misc_feature (1)..(2): 2'-O-methyl
  misc_feature (3)..(4): 2'-deoxy-2'Fluoro
  misc_feature (5)..(5): 2'-O-methyl
  misc_feature (6)..(6): 2'-deoxy-2'Fluoro
  misc_feature (7)..(9): 2'-O-methyl
  misc_feature (10)..(11): 2'-deoxy-2'Fluoro
  misc_feature (12)..(14): 2'-O-methyl
  misc_feature (15)..(17): 2'-deoxy-2'Fluoro
  misc_feature (18)..(19): 2'-O-methyl
  misc_feature (20)..(20): Phosphorothioate or Phosphorodithioate 3'-Internucleotide Linkage (optionally present)
  misc_feature (1)..(19): ribonucleotide unmodified or modified as described for this sequence
ggcuacaagccagguccagtt

SEQ ID NO: 1794 - DNA, 21 bp, Artificial Sequence
  Description of Artificial Sequence: Target Sequence/siNA sense region (stab09)
  misc_feature (1)..(1): 5'-3 attached terminal deoxyabasic moiety, inverted abasic, inverted nucleotide or other terminal cap that is optionally present
  misc_feature (21)..(21): 3'-3 attached terminal deoxyabasic moiety, inverted abasic, inverted nucleotide or other terminal cap that is optionally present
  misc_feature (1)..(19): ribonucleotide unmodified or modified as described for this sequence
cuggaccuggcuuguagcctt

SEQ ID NO: 1795 - DNA, 21 bp, Artificial Sequence
  Description of Artificial Sequence: Target Sequence/siNA antisense region (stab10)
  misc_feature (20)..(20): Phosphorothioate or Phosphorodithioate 3'-Internucleotide Linkage (optionally present)
  misc_feature (1)..(19): ribonucleotide unmodified or modified as described for this sequence
ggcuacaagccagguccagtt

SEQ ID NO: 1796 - DNA, 21 bp, Artificial Sequence
  Description of Artificial Sequence: Target Sequence/siNA antisense region (stab19)
  misc_feature (21)..(21): 3'-3 attached terminal deoxyabasic moiety, inverted abasic, inverted nucleotide or other terminal cap that is optionally present
  misc_feature (1)..(2): 2'-O-methyl
  misc_feature (3)..(4): 2'-deoxy-2'Fluoro
  misc_feature (5)..(5): 2'-O-methyl
  misc_feature (6)..(6): 2'-deoxy-2'Fluoro
  misc_feature (7)..(9): 2'-O-methyl
  misc_feature (10)..(11): 2'-deoxy-2'Fluoro
  misc_feature (12)..(14): 2'-O-methyl
  misc_feature (15)..(17): 2'-deoxy-2'Fluoro
  misc_feature (18)..(19): 2'-O-methyl
  misc_feature (1)..(19): ribonucleotide unmodified or modified as described for this sequence
ggcuacaagccagguccagtt

SEQ ID NO: 1797 - DNA, 21 bp, Artificial Sequence
  Description of Artificial Sequence: Target Sequence/siNA antisense region (stab22)
  misc_feature (21)..(21): 3'-3 attached terminal deoxyabasic moiety, inverted abasic, inverted nucleotide or other terminal cap that is optionally present
  misc_feature (20)..(20): Phosphorothioate or Phosphorodithioate 3'-Internucleotide Linkage (optionally present)
  misc_feature (1)..(19): ribonucleotide unmodified or modified as described for this sequence
ggcuacaagccagguccagtt

SEQ ID NO: 1798 - DNA, 21 bp, Artificial Sequence
  Description of Artificial Sequence: Target Sequence/siNA antisense region (stab25)
  misc_feature (4)..(4): 2'-deoxy-2'Fluoro
  misc_feature (5)..(5): 2'-O-methyl
  misc_feature (6)..(6): 2'-deoxy-2'Fluoro
  misc_feature (7)..(9): 2'-O-methyl
  misc_feature (10)..(11): 2'-deoxy-2'Fluoro
  misc_feature (12)..(14): 2'-O-methyl
  misc_feature (15)..(17): 2'-deoxy-2'Fluoro
  misc_feature (18)..(19): 2'-O-methyl
  misc_feature (20)..(20): Phosphorothioate or Phosphorodithioate 3'-Internucleotide Linkage (optionally present)
  misc_feature (1)..(19): ribonucleotide unmodified or modified as described for this sequence
ggcuacaagccagguccagtt

SEQ ID NO: 1799 - RNA, 21 nt, Artificial Sequence
  Description of Artificial Sequence: Target Sequence/siNA antisense region (stab35)
  misc_feature (4)..(4): 2'-deoxy-2'Fluoro
  misc_feature (5)..(5): 2'-O-methyl
  misc_feature (6)..(6): 2'-deoxy-2'Fluoro
  misc_feature (7)..(9): 2'-O-methyl
  misc_feature (10)..(11): 2'-deoxy-2'Fluoro
  misc_feature (12)..(14): 2'-O-methyl
  misc_feature (15)..(17): 2'-deoxy-2'Fluoro
  misc_feature (18)..(21): 2'-O-methyl
ggcuacaagccagguccaguu

SEQ ID NO: 1800 - RNA, 21 nt, Artificial Sequence
  Description of Artificial Sequence: Target Sequence/siNA antisense region (stab36)
  misc_feature (4)..(4): 2'-deoxy-2'Fluoro
  misc_feature (5)..(5): 2'-O-methyl
  misc_feature (6)..(6): 2'-deoxy-2'Fluoro
  misc_feature (7)..(9): 2'-O-methyl
  misc_feature (10)..(11): 2'-deoxy-2'Fluoro
  misc_feature (12)..(14): 2'-O-methyl
  misc_feature (15)..(17): 2'-deoxy-2'Fluoro
  misc_feature (18)..(21): 2'-O-methyl
ggcuacaagccagguccaggu

SEQ ID NO: 1801 - RNA, 19 nt, Artificial Sequence
  Description of Artificial Sequence: Target Sequence/siNA sense region
cuccucuggaaccucaucc

SEQ ID NO: 1802 - RNA, 19 nt, Artificial Sequence
  Description of Artificial Sequence: Target Sequence/siNA antisense region
ggaugagguuccagaggag

SEQ ID NO: 1803 - DNA, 21 bp, Artificial Sequence
  Description of Artificial Sequence: Target Sequence/siNA sense region (stab00)
  misc_feature (1)..(19): ribonucleotide unmodified or modified as described for this sequence
cuccucuggaaccucaucctt

SEQ ID NO: 1804 - DNA, 21 bp, Artificial Sequence
  Description of Artificial Sequence: Target Sequence/siNA antisense region (stab00as)
  misc_feature (1)..(19): ribonucleotide unmodified or modified as described for this sequence
ggaugagguuccagaggagtt

SEQ ID NO: 1805 - DNA, 21 bp, Artificial Sequence
  Description of Artificial Sequence: Target Sequence/siNA sense region (stab04)
  misc_feature (1)..(1): 5'-3 attached terminal deoxyabasic moiety, inverted abasic, inverted nucleotide or other terminal cap that is optionally present
  misc_feature (21)..(21): 3'-3 attached terminal deoxyabasic moiety, inverted abasic, inverted nucleotide or other terminal cap that is optionally present
  misc_feature (1)..(7): 2'-deoxy-2'Fluoro
  misc_feature (12)..(15): 2'-deoxy-2'Fluoro
  misc_feature (17)..(19): 2'-deoxy-2'Fluoro
  misc_feature (1)..(19): ribonucleotide unmodified or modified as described for this sequence
cuccucuggaaccucaucctt

SEQ ID NO: 1806 - DNA, 21 bp, Artificial Sequence
  Description of Artificial Sequence: Target Sequence/siNA antisense region (stab05)
  misc_feature (4)..(4): 2'-deoxy-2'Fluoro
  misc_feature (9)..(12): 2'-deoxy-2'Fluoro
  misc_feature (20)..(20): Phosphorothioate or Phosphorodithioate 3'-Internucleotide Linkage (optionally present)
  misc_feature (1)..(19): ribonucleotide unmodified or modified as described for this sequence
ggaugagguuccagaggagtt

SEQ ID NO: 1807 - DNA, 21 bp, Artificial Sequence
  Description of Artificial Sequence: Target Sequence/siNA sense region (stab07)
  misc_feature (1)..(1): 5'-3 attached terminal deoxyabasic moiety, inverted abasic, inverted nucleotide or other terminal cap that is optionally present
  misc_feature (21)..(21): 3'-3 attached terminal deoxyabasic moiety, inverted abasic, inverted nucleotide or other terminal cap that is optionally present
  misc_feature (1)..(7): 2'-deoxy-2'Fluoro
  misc_feature (12)..(15): 2'-deoxy-2'Fluoro
  misc_feature (17)..(19): 2'-deoxy-2'Fluoro
  misc_feature (1)..(19): ribonucleotide unmodified or modified as described for this sequence
cuccucuggaaccucaucctt

SEQ ID NO: 1808 - DNA, 21 bp, Artificial Sequence
  Description of Artificial Sequence: Target Sequence/siNA antisense region (stab08)
  misc_feature (1)..(3): 2'-O-methyl
  misc_feature (4)..(4): 2'-deoxy-2'Fluoro
  misc_feature (5)..(8): 2'-O-methyl
  misc_feature (9)..(12): 2'-deoxy-2'Fluoro
  misc_feature (13)..(19): 2'-O-methyl
  misc_feature (20)..(20): Phosphorothioate or Phosphorodithioate 3'-Internucleotide Linkage (optionally present)
  misc_feature (1)..(19): ribonucleotide unmodified or modified as described for this sequence
ggaugagguuccagaggagtt

SEQ ID NO: 1809 - DNA, 21 bp, Artificial Sequence
  Description of Artificial Sequence: Target Sequence/siNA sense region (stab09)
  misc_feature (1)..(1): 5'-3 attached terminal deoxyabasic moiety, inverted abasic, inverted nucleotide or other terminal cap that is optionally present
  misc_feature (21)..(21): 3'-3 attached terminal deoxyabasic moiety, inverted abasic, inverted nucleotide or other terminal cap that is optionally present
  misc_feature (1)..(19): ribonucleotide unmodified or modified as described for this sequence
cuccucuggaaccucaucctt

SEQ ID NO: 1810 - DNA, 21 bp, Artificial Sequence
  Description of Artificial Sequence: Target Sequence/siNA antisense region (stab10)
  misc_feature (20)..(20): Phosphorothioate or Phosphorodithioate 3'-Internucleotide Linkage (optionally present)
  misc_feature (1)..(19): ribonucleotide unmodified or modified as described for this sequence
ggaugagguuccagaggagtt

SEQ ID NO: 1811 - DNA, 21 bp, Artificial Sequence
  Description of Artificial Sequence: Target Sequence/siNA antisense region (stab19)
  misc_feature (21)..(21): 3'-3 attached terminal deoxyabasic moiety, inverted abasic, inverted nucleotide or other terminal cap that is optionally present
  misc_feature (1)..(3): 2'-O-methyl
  misc_feature (4)..(4): 2'-deoxy-2'Fluoro
  misc_feature (5)..(8): 2'-O-methyl
  misc_feature (9)..(12): 2'-deoxy-2'Fluoro
  misc_feature (13)..(19): 2'-O-methyl
  misc_feature (1)..(19): ribonucleotide unmodified or modified as described for this sequence
ggaugagguuccagaggagtt

SEQ ID NO: 1812 - DNA, 21 bp, Artificial Sequence
  Description of Artificial Sequence: Target Sequence/siNA antisense region (stab22)
  misc_feature (21)..(21): 3'-3 attached terminal deoxyabasic moiety, inverted abasic, inverted nucleotide or other terminal cap that is optionally present
  misc_feature (20)..(20): Phosphorothioate or Phosphorodithioate 3'-Internucleotide Linkage (optionally present)
  misc_feature (1)..(19): ribonucleotide unmodified or modified as described for this sequence
ggaugagguuccagaggagtt

SEQ ID NO: 1813 - DNA, 21 bp, Artificial Sequence
  Description of Artificial Sequence: Target Sequence/siNA antisense region (stab25)
  misc_feature (4)..(4): 2'-deoxy-2'Fluoro
  misc_feature (5)..(8): 2'-O-methyl
  misc_feature (9)..(12): 2'-deoxy-2'Fluoro
  misc_feature (13)..(19): 2'-O-methyl
  misc_feature (20)..(20): Phosphorothioate or Phosphorodithioate 3'-Internucleotide Linkage (optionally present)
  misc_feature (1)..(19): ribonucleotide unmodified or modified as described for this sequence
ggaugagguuccagaggagtt

SEQ ID NO: 1814 - RNA, 21 nt, Artificial Sequence
  Description of Artificial Sequence: Target Sequence/siNA antisense region (stab35)
  misc_feature (4)..(4): 2'-deoxy-2'Fluoro
  misc_feature (5)..(8): 2'-O-methyl
  misc_feature (9)..(12): 2'-deoxy-2'Fluoro
  misc_feature (13)..(21): 2'-O-methyl
ggaugagguuccagaggaguu

SEQ ID NO: 1815 - RNA, 21 nt, Artificial Sequence
  Description of Artificial Sequence: Target Sequence/siNA antisense region (stab36)
  misc_feature (4)..(4): 2'-deoxy-2'Fluoro
  misc_feature (5)..(8): 2'-O-methyl
  misc_feature (9)..(12): 2'-deoxy-2'Fluoro
  misc_feature (13)..(21): 2'-O-methyl
ggaugagguuccagaggaggc

SEQ ID NO: 1816 - RNA, 19 nt, Artificial Sequence
  Description of Artificial Sequence: Target Sequence/siNA sense region
cgucaccugcugcagcguc

SEQ ID NO: 1817 - RNA, 19 nt, Artificial Sequence
  Description of Artificial Sequence: Target Sequence/siNA antisense region
gacgcugcagcaggugacg

SEQ ID NO: 1818 - DNA, 21 bp, Artificial Sequence
  Description of Artificial Sequence: Target Sequence/siNA sense region (stab00)
  misc_feature (1)..(19): ribonucleotide unmodified or modified as described for this sequence
cgucaccugcugcagcguctt

SEQ ID NO: 1819 - DNA, 21 bp, Artificial Sequence
  Description of Artificial Sequence: Target Sequence/siNA antisense region (stab00as)
  misc_feature (1)..(19): ribonucleotide unmodified or modified as described for this sequence
gacgcugcagcaggugacgtt

SEQ ID NO: 1820 - DNA, 21 bp, Artificial Sequence
  Description of Artificial Sequence: Target Sequence/siNA sense region (stab04)
  misc_feature (1)..(1): 5'-3 attached terminal deoxyabasic moiety, inverted abasic, inverted nucleotide or other terminal cap that is optionally present
  misc_feature (21)..(21): 3'-3 attached terminal deoxyabasic moiety, inverted abasic, inverted nucleotide or other terminal cap that is optionally present
  misc_feature (1)..(1): 2'-deoxy-2'Fluoro
  misc_feature (3)..(4): 2'-deoxy-2'Fluoro
  misc_feature (6)..(8): 2'-deoxy-2'Fluoro
  misc_feature (10)..(11): 2'-deoxy-2'Fluoro
  misc_feature (13)..(13): 2'-deoxy-2'Fluoro
  misc_feature (16)..(16): 2'-deoxy-2'Fluoro
  misc_feature (18)..(19): 2'-deoxy-2'Fluoro
  misc_feature (1)..(19): ribonucleotide unmodified or modified as described for this sequence
cgucaccugcugcagcguctt

SEQ ID NO: 1821 - DNA, 21 bp, Artificial Sequence
  Description of Artificial Sequence: Target Sequence/siNA antisense region (stab05)
  misc_feature (3)..(3): 2'-deoxy-2'Fluoro
  misc_feature (5)..(6): 2'-deoxy-2'Fluoro
  misc_feature (8)..(8): 2'-deoxy-2'Fluoro
  misc_feature (11)..(11): 2'-deoxy-2'Fluoro
  misc_feature (15)..(15): 2'-deoxy-2'Fluoro
  misc_feature (18)..(18): 2'-deoxy-2'Fluoro
  misc_feature (20)..(20): Phosphorothioate or Phosphorodithioate 3'-Internucleotide Linkage (optionally present)
  misc_feature (1)..(19): ribonucleotide unmodified or modified as described for this sequence
gacgcugcagcaggugacgtt

SEQ ID NO: 1822 - DNA, 21 bp, Artificial Sequence
  Description of Artificial Sequence: Target Sequence/siNA sense region (stab07)
  misc_feature (1)..(1): 5'-3 attached terminal deoxyabasic moiety, inverted abasic, inverted nucleotide or other terminal cap that is optionally present
  misc_feature (21)..(21): 3'-3 attached terminal deoxyabasic moiety, inverted abasic, inverted nucleotide or other terminal cap that is optionally present
  misc_feature (1)..(1): 2'-deoxy-2'Fluoro
  misc_feature (3)..(4): 2'-deoxy-2'Fluoro
  misc_feature (6)..(8): 2'-deoxy-2'Fluoro
  misc_feature (10)..(11): 2'-deoxy-2'Fluoro
  misc_feature (13)..(13): 2'-deoxy-2'Fluoro
  misc_feature (16)..(16): 2'-deoxy-2'Fluoro
  misc_feature (18)..(19): 2'-deoxy-2'Fluoro
  misc_feature (1)..(19): ribonucleotide unmodified or modified as described for this sequence
cgucaccugcugcagcguctt

SEQ ID NO: 1823 - DNA, 21 bp, Artificial Sequence
  Description of Artificial Sequence: Target Sequence/siNA antisense region (stab08)
  misc_feature (1)..(2): 2'-O-methyl
  misc_feature (3)..(3): 2'-deoxy-2'Fluoro
  misc_feature (4)..(4): 2'-O-methyl
  misc_feature (5)..(6): 2'-deoxy-2'Fluoro
  misc_feature (7)..(7): 2'-O-methyl
  misc_feature (8)..(8): 2'-deoxy-2'Fluoro
  misc_feature (9)..(10): 2'-O-methyl
  misc_feature (11)..(11): 2'-deoxy-2'Fluoro
  misc_feature (12)..(14): 2'-O-methyl
  misc_feature (15)..(15): 2'-deoxy-2'Fluoro
  misc_feature (16)..(17): 2'-O-methyl
  misc_feature (18)..(18): 2'-deoxy-2'Fluoro
  misc_feature (19)..(19): 2'-O-methyl
  misc_feature (20)..(20): Phosphorothioate or Phosphorodithioate 3'-Internucleotide Linkage (optionally present)
  misc_feature (1)..(19): ribonucleotide unmodified or modified as described for this sequence
gacgcugcagcaggugacgtt

SEQ ID NO: 1824 - DNA, 21 bp, Artificial Sequence
  Description of Artificial Sequence: Target Sequence/siNA sense region (stab09)
  misc_feature (1)..(1): 5'-3 attached terminal deoxyabasic moiety, inverted abasic, inverted nucleotide or other terminal cap that is optionally present
  misc_feature (21)..(21): 3'-3 attached terminal deoxyabasic moiety, inverted abasic, inverted nucleotide or other terminal cap that is optionally present
  misc_feature (1)..(19): ribonucleotide unmodified or modified as described for this sequence
cgucaccugcugcagcguctt

SEQ ID NO: 1825 - DNA, 21 bp, Artificial Sequence
  Description of Artificial Sequence: Target Sequence/siNA antisense region (stab10)
  misc_feature (20)..(20): Phosphorothioate or Phosphorodithioate 3'-Internucleotide Linkage (optionally present)
  misc_feature (1)..(19): ribonucleotide unmodified or modified as described for this sequence
gacgcugcagcaggugacgtt

SEQ ID NO: 1826 - DNA, 21 bp, Artificial Sequence
  Description of Artificial Sequence: Target Sequence/siNA antisense region (stab19)
  misc_feature (21)..(21): 3'-3 attached terminal deoxyabasic moiety, inverted abasic, inverted nucleotide or other terminal cap that is optionally present
  misc_feature (1)..(2): 2'-O-methyl
  misc_feature (3)..(3): 2'-deoxy-2'Fluoro
  misc_feature (4)..(4): 2'-O-methyl
  misc_feature (5)..(6): 2'-deoxy-2'Fluoro
  misc_feature (7)..(7): 2'-O-methyl
  misc_feature (8)..(8): 2'-deoxy-2'Fluoro
  misc_feature (9)..(10): 2'-O-methyl
  misc_feature (11)..(11): 2'-deoxy-2'Fluoro
  misc_feature (12)..(14): 2'-O-methyl
  misc_feature (15)..(15): 2'-deoxy-2'Fluoro
  misc_feature (16)..(17): 2'-O-methyl
  misc_feature (18)..(18): 2'-deoxy-2'Fluoro
  misc_feature (19)..(19): 2'-O-methyl
  misc_feature (1)..(19): ribonucleotide unmodified or modified as described for this sequence
gacgcugcagcaggugacgtt

SEQ ID NO: 1827 - DNA, 21 bp, Artificial Sequence
  Description of Artificial Sequence: Target Sequence/siNA antisense region (stab22)
  misc_feature (21)..(21): 3'-3 attached terminal deoxyabasic moiety, inverted abasic, inverted nucleotide or other terminal cap that is optionally present
  misc_feature (20)..(20): Phosphorothioate or Phosphorodithioate 3'-Internucleotide Linkage (optionally present)
  misc_feature (1)..(19): ribonucleotide unmodified or modified as described for this sequence
gacgcugcagcaggugacgtt

SEQ ID NO: 1828 - DNA, 21 bp, Artificial Sequence
  Description of Artificial Sequence: Target Sequence/siNA antisense region (stab25)
  misc_feature (4)..(4): 2'-O-methyl
  misc_feature (5)..(6): 2'-deoxy-2'Fluoro
  misc_feature (7)..(7): 2'-O-methyl
  misc_feature (8)..(8): 2'-deoxy-2'Fluoro
  misc_feature (9)..(10): 2'-O-methyl
  misc_feature (11)..(11): 2'-deoxy-2'Fluoro
  misc_feature (12)..(14): 2'-O-methyl
  misc_feature (15)..(15): 2'-deoxy-2'Fluoro
  misc_feature (16)..(17): 2'-O-methyl
  misc_feature (18)..(18): 2'-deoxy-2'Fluoro
  misc_feature (19)..(19): 2'-O-methyl
  misc_feature (20)..(20): Phosphorothioate or Phosphorodithioate 3'-Internucleotide Linkage (optionally present)
  misc_feature (1)..(19): ribonucleotide unmodified or modified as described for this sequence
gacgcugcagcaggugacgtt

SEQ ID NO: 1829 - RNA, 21 nt, Artificial Sequence
  Description of Artificial Sequence: Target Sequence/siNA antisense region (stab35)
  misc_feature (4)..(4): 2'-O-methyl
  misc_feature (5)..(6): 2'-deoxy-2'Fluoro
  misc_feature (7)..(7): 2'-O-methyl
  misc_feature (8)..(8): 2'-deoxy-2'Fluoro
  misc_feature (9)..(10): 2'-O-methyl
  misc_feature (11)..(11): 2'-deoxy-2'Fluoro
  misc_feature (12)..(14): 2'-O-methyl
  misc_feature (15)..(15): 2'-deoxy-2'Fluoro
  misc_feature (16)..(17): 2'-O-methyl
  misc_feature (18)..(18): 2'-deoxy-2'Fluoro
  misc_feature (19)..(21): 2'-O-methyl
gacgcugcagcaggugacguu

SEQ ID NO: 1830 - RNA, 21 nt, Artificial Sequence
  Description of Artificial Sequence: Target Sequence/siNA antisense region (stab36)
  misc_feature (4)..(4): 2'-O-methyl
  misc_feature (5)..(6): 2'-deoxy-2'Fluoro
  misc_feature (7)..(7): 2'-O-methyl
  misc_feature (8)..(8): 2'-deoxy-2'Fluoro
  misc_feature (9)..(10): 2'-O-methyl
  misc_feature (11)..(11): 2'-deoxy-2'Fluoro
  misc_feature (12)..(14): 2'-O-methyl
  misc_feature (15)..(15): 2'-deoxy-2'Fluoro
  misc_feature (16)..(17): 2'-O-methyl
  misc_feature (18)..(18): 2'-deoxy-2'Fluoro
  misc_feature (19)..(21): 2'-O-methyl
gacgcugcagcaggugacgga

SEQ ID NO: 1831 - RNA, 19 nt, Artificial Sequence
  Description of Artificial Sequence: Target Sequence/siNA sense region
cucugggugggccgcuggc

SEQ ID NO: 1832 - RNA, 19 nt, Artificial Sequence
  Description of Artificial Sequence: Target Sequence/siNA antisense region
gccagcggcccacccagag

SEQ ID NO: 1833 - DNA, 21 bp, Artificial Sequence
  Description of Artificial Sequence: Target Sequence/siNA sense region (stab00)
  misc_feature (1)..(19): ribonucleotide unmodified or modified as described for this sequence
cucugggugggccgcuggctt

SEQ ID NO: 1834 - DNA, 21 bp, Artificial Sequence
  Description of Artificial Sequence: Target Sequence/siNA antisense region (stab00as)
  misc_feature (1)..(19): ribonucleotide unmodified or modified as described for this sequence
gccagcggcccacccagagtt

SEQ ID NO: 1835 - DNA, 21 bp, Artificial Sequence
  Description of Artificial Sequence: Target Sequence/siNA sense region (stab04)
  misc_feature (1)..(1): 5'-3 attached terminal deoxyabasic moiety, inverted abasic, inverted nucleotide or other terminal cap that is optionally present
  misc_feature (21)..(21): 3'-3 attached terminal deoxyabasic moiety, inverted abasic, inverted nucleotide or other terminal cap that is optionally present
  misc_feature (1)..(4): 2'-deoxy-2'Fluoro
  misc_feature (8)..(8): 2'-deoxy-2'Fluoro
  misc_feature (12)..(13): 2'-deoxy-2'Fluoro
  misc_feature (15)..(16): 2'-deoxy-2'Fluoro
  misc_feature (19)..(19): 2'-deoxy-2'Fluoro
  misc_feature (1)..(19): ribonucleotide unmodified or modified as described for this sequence
cucugggugggccgcuggctt

SEQ ID NO: 1836 - DNA, 21 bp, Artificial Sequence
  Description of Artificial Sequence: Target Sequence/siNA antisense region (stab05)
  misc_feature (2)..(3): 2'-deoxy-2'Fluoro
  misc_feature (6)..(6): 2'-deoxy-2'Fluoro
  misc_feature (9)..(11): 2'-deoxy-2'Fluoro
  misc_feature (13)..(15): 2'-deoxy-2'Fluoro
  misc_feature (20)..(20): Phosphorothioate or Phosphorodithioate 3'-Internucleotide Linkage (optionally present)
  misc_feature (1)..(19): ribonucleotide unmodified or modified as described for this sequence
gccagcggcccacccagagtt

SEQ ID NO: 1837 - DNA, 21 bp, Artificial Sequence
  Description of Artificial Sequence: Target Sequence/siNA sense region (stab07)
  misc_feature (1)..(1): 5'-3 attached terminal deoxyabasic moiety, inverted abasic, inverted nucleotide or other terminal cap that is optionally present
  misc_feature (21)..(21): 3'-3 attached terminal deoxyabasic moiety, inverted abasic, inverted nucleotide or other terminal cap that is optionally present
  misc_feature (1)..(4): 2'-deoxy-2'Fluoro
  misc_feature (8)..(8): 2'-deoxy-2'Fluoro
  misc_feature (12)..(13): 2'-deoxy-2'Fluoro
  misc_feature (15)..(16): 2'-deoxy-2'Fluoro
  misc_feature (19)..(19): 2'-deoxy-2'Fluoro
  misc_feature (1)..(19): ribonucleotide unmodified or modified as described for this sequence
cucugggugggccgcuggctt

SEQ ID NO: 1838 - DNA, 21 bp, Artificial Sequence
  Description of Artificial Sequence: Target Sequence/siNA antisense region (stab08)
  misc_feature (1)..(1): 2'-O-methyl
  misc_feature (2)..(3): 2'-deoxy-2'Fluoro
  misc_feature (4)..(5): 2'-O-methyl
  misc_feature (6)..(6): 2'-deoxy-2'Fluoro
  misc_feature (7)..(8): 2'-O-methyl
  misc_feature (9)..(11): 2'-deoxy-2'Fluoro
  misc_feature (12)..(12): 2'-O-methyl
  misc_feature (13)..(15): 2'-deoxy-2'Fluoro
  misc_feature (16)..(19): 2'-O-methyl
  misc_feature (20)..(20): Phosphorothioate or Phosphorodithioate 3'-Internucleotide Linkage (optionally present)
  misc_feature (1)..(19): ribonucleotide unmodified or modified as described for this sequence
gccagcggcccacccagagtt

SEQ ID NO: 1839 - DNA, 21 bp, Artificial Sequence
  Description of Artificial Sequence: Target Sequence/siNA sense region (stab09)
  misc_feature (1)..(1): 5'-3 attached terminal deoxyabasic moiety, inverted abasic, inverted nucleotide or other terminal cap that is optionally present
  misc_feature (21)..(21): 3'-3 attached terminal deoxyabasic moiety, inverted abasic, inverted nucleotide or other terminal cap that is optionally present
  misc_feature (1)..(19): ribonucleotide unmodified or modified as described for this sequence
cucugggugggccgcuggctt

SEQ ID NO: 1840 - DNA, 21 bp, Artificial Sequence
  Description of Artificial Sequence: Target Sequence/siNA antisense region (stab10)
  misc_feature (20)..(20): Phosphorothioate or Phosphorodithioate 3'-Internucleotide Linkage (optionally present)
  misc_feature (1)..(19): ribonucleotide unmodified or modified as described for this sequence
gccagcggcccacccagagtt

SEQ ID NO: 1841 - DNA, 21 bp, Artificial Sequence
  Description of Artificial Sequence: Target Sequence/siNA antisense region (stab19)
  misc_feature (21)..(21): 3'-3 attached terminal deoxyabasic moiety, inverted abasic, inverted nucleotide or other terminal cap that is optionally present
  misc_feature (1)..(1): 2'-O-methyl
  misc_feature (2)..(3): 2'-deoxy-2'Fluoro
  misc_feature (4)..(5): 2'-O-methyl
  misc_feature (6)..(6): 2'-deoxy-2'Fluoro
  misc_feature (7)..(8): 2'-O-methyl
  misc_feature (9)..(11): 2'-deoxy-2'Fluoro
  misc_feature (12)..(12): 2'-O-methyl
  misc_feature (13)..(15): 2'-deoxy-2'Fluoro
  misc_feature (16)..(19): 2'-O-methyl
  misc_feature (1)..(19): ribonucleotide unmodified or modified as described for this sequence
gccagcggcccacccagagtt

SEQ ID NO: 1842 - DNA, 21 bp, Artificial Sequence
  Description of Artificial Sequence: Target Sequence/siNA antisense region (stab22)
  misc_feature (21)..(21): 3'-3 attached terminal deoxyabasic moiety, inverted abasic, inverted nucleotide or other terminal cap that is optionally present
  misc_feature (20)..(20): Phosphorothioate or Phosphorodithioate 3'-Internucleotide Linkage (optionally present)
  misc_feature (1)..(19): ribonucleotide unmodified or modified as described for this sequence
gccagcggcccacccagagtt

SEQ ID NO: 1843 - DNA, 21 bp, Artificial Sequence
  Description of Artificial Sequence: Target Sequence/siNA antisense region (stab25)
  misc_feature (4)..(5): 2'-O-methyl
  misc_feature (6)..(6): 2'-deoxy-2'Fluoro
  misc_feature (7)..(8): 2'-O-methyl
  misc_feature (9)..(11): 2'-deoxy-2'Fluoro
  misc_feature (12)..(12): 2'-O-methyl
  misc_feature (13)..(15): 2'-deoxy-2'Fluoro
  misc_feature (16)..(19): 2'-O-methyl
  misc_feature (20)..(20): Phosphorothioate or Phosphorodithioate 3'-Internucleotide Linkage (optionally present)
  misc_feature (1)..(19): ribonucleotide unmodified or modified as described for this sequence
gccagcggcccacccagagtt

SEQ ID NO: 1844 - RNA, 21 nt, Artificial Sequence
  Description of Artificial Sequence: Target Sequence/siNA antisense region (stab35)
  misc_feature (4)..(5): 2'-O-methyl
  misc_feature (6)..(6): 2'-deoxy-2'Fluoro
  misc_feature (7)..(8): 2'-O-methyl
  misc_feature (9)..(11): 2'-deoxy-2'Fluoro
  misc_feature (12)..(12): 2'-O-methyl
  misc_feature (13)..(15): 2'-deoxy-2'Fluoro
  misc_feature (16)..(21): 2'-O-methyl
gccagcggcccacccagaguu

SEQ ID NO: 1845 - RNA, 21 nt, Artificial Sequence
  Description of Artificial Sequence: Target Sequence/siNA antisense region (stab36)
  misc_feature (4)..(5): 2'-O-methyl
  misc_feature (6)..(6): 2'-deoxy-2'Fluoro
  misc_feature (7)..(8): 2'-O-methyl
  misc_feature (9)..(11): 2'-deoxy-2'Fluoro
  misc_feature (12)..(12): 2'-O-methyl
  misc_feature (13)..(15): 2'-deoxy-2'Fluoro
  misc_feature (16)..(21): 2'-O-methyl
gccagcggcccacccagagac

SEQ ID NO: 1846 - RNA, 19 nt, Artificial Sequence
  Description of Artificial Sequence: Target Sequence/siNA sense region
cuggcaggccgggcagggg

SEQ ID NO: 1847 - RNA, 19 nt, Artificial Sequence
  Description of Artificial Sequence: Target Sequence/siNA antisense region
ccccugcccggccugccag

SEQ ID NO: 1848 - DNA, 21 bp, Artificial Sequence
  Description of Artificial Sequence: Target Sequence/siNA sense region (stab00)
  misc_feature (1)..(19): ribonucleotide unmodified or modified as described for this sequence
cuggcaggccgggcaggggtt

SEQ ID NO: 1849 - DNA, 21 bp, Artificial Sequence
  Description of Artificial Sequence: Target Sequence/siNA antisense region (stab00as)
  misc_feature (1)..(19): ribonucleotide unmodified or modified as described for this sequence
ccccugcccggccugccagtt

SEQ ID NO: 1850 - DNA, 21 bp, Artificial Sequence
  Description of Artificial Sequence: Target Sequence/siNA sense region (stab04)
  misc_feature (1)..(1): 5'-3 attached terminal deoxyabasic moiety, inverted abasic, inverted nucleotide or other terminal cap that is optionally present
  misc_feature (21)..(21): 3'-3 attached terminal deoxyabasic moiety, inverted abasic, inverted nucleotide or other terminal cap that is optionally present
  misc_feature (1)..(2): 2'-deoxy-2'Fluoro
  misc_feature (5)..(5): 2'-deoxy-2'Fluoro
  misc_feature (9)..(10): 2'-deoxy-2'Fluoro
  misc_feature (14)..(14): 2'-deoxy-2'Fluoro
  misc_feature (1)..(19): ribonucleotide unmodified or modified as described for this sequence
cuggcaggccgggcaggggtt

SEQ ID NO: 1851 - DNA, 21 bp, Artificial Sequence
  Description of Artificial Sequence: Target Sequence/siNA antisense region (stab05)
  misc_feature (1)..(5): 2'-deoxy-2'Fluoro
  misc_feature (7)..(9): 2'-deoxy-2'Fluoro
  misc_feature (12)..(14): 2'-deoxy-2'Fluoro
  misc_feature (16)..(17): 2'-deoxy-2'Fluoro
  misc_feature (20)..(20): Phosphorothioate or Phosphorodithioate 3'-Internucleotide Linkage (optionally present)
  misc_feature (1)..(19): ribonucleotide unmodified or modified as described for this sequence
ccccugcccggccugccagtt

SEQ ID NO: 1852 - DNA, 21 bp, Artificial Sequence
  Description of Artificial Sequence: Target Sequence/siNA sense region (stab07)
  misc_feature (1)..(1): 5'-3 attached terminal deoxyabasic moiety, inverted abasic, inverted nucleotide or other terminal cap that is optionally present
  misc_feature (21)..(21): 3'-3 attached terminal deoxyabasic moiety, inverted abasic, inverted nucleotide or other terminal cap that is optionally present
  misc_feature (1)..(2): 2'-deoxy-2'Fluoro
  misc_feature (5)..(5): 2'-deoxy-2'Fluoro
  misc_feature (9)..(10): 2'-deoxy-2'Fluoro
  misc_feature (14)..(14): 2'-deoxy-2'Fluoro
  misc_feature (1)..(19): ribonucleotide unmodified or modified as described for this sequence
cuggcaggccgggcaggggtt

SEQ ID NO: 1853 - DNA, 21 bp, Artificial Sequence
  Description of Artificial Sequence: Target Sequence/siNA antisense region (stab08)
  misc_feature (1)..(5): 2'-deoxy-2'Fluoro
  misc_feature (6)..(6): 2'-O-methyl
  misc_feature (7)..(9): 2'-deoxy-2'Fluoro
  misc_feature (10)..(11): 2'-O-methyl
  misc_feature (12)..(14): 2'-deoxy-2'Fluoro
  misc_feature (15)..(15): 2'-O-methyl
  misc_feature (16)..(17): 2'-deoxy-2'Fluoro
  misc_feature (18)..(19): 2'-O-methyl
  misc_feature (20)..(20): Phosphorothioate or Phosphorodithioate 3'-Internucleotide Linkage (optionally present)
  misc_feature (1)..(19): ribonucleotide unmodified or modified as described for this sequence
ccccugcccggccugccagtt

SEQ ID NO: 1854 - DNA, 21 bp, Artificial Sequence
  Description of Artificial Sequence: Target Sequence/siNA sense region (stab09)
  misc_feature (1)..(1): 5'-3 attached terminal deoxyabasic moiety, inverted abasic, inverted nucleotide or other terminal cap that is optionally present
  misc_feature (21)..(21): 3'-3 attached terminal deoxyabasic moiety, inverted abasic, inverted nucleotide or other terminal cap that is optionally present
  misc_feature (1)..(19): ribonucleotide unmodified or modified as described for this sequence
cuggcaggccgggcaggggtt

SEQ ID NO: 1855 - DNA, 21 bp, Artificial Sequence
  Description of Artificial Sequence: Target Sequence/siNA antisense region (stab10)
  misc_feature (20)..(20): Phosphorothioate or Phosphorodithioate 3'-Internucleotide Linkage (optionally present)
  misc_feature (1)..(19): ribonucleotide unmodified or modified as described for this sequence
ccccugcccggccugccagtt

SEQ ID NO: 1856 - DNA, 21 bp, Artificial Sequence
  Description of Artificial Sequence: Target Sequence/siNA antisense region (stab19)
  misc_feature (21)..(21): 3'-3 attached terminal deoxyabasic moiety, inverted abasic, inverted nucleotide or other terminal cap that is optionally present
  misc_feature (1)..(5): 2'-deoxy-2'Fluoro
  misc_feature (6)..(6): 2'-O-methyl
  misc_feature (7)..(9): 2'-deoxy-2'Fluoro
  misc_feature (10)..(11): 2'-O-methyl
  misc_feature (12)..(14): 2'-deoxy-2'Fluoro
  misc_feature (15)..(15): 2'-O-methyl
  misc_feature (16)..(17): 2'-deoxy-2'Fluoro
  misc_feature (18)..(19): 2'-O-methyl
  misc_feature (1)..(19): ribonucleotide unmodified or modified as described for this sequence
ccccugcccggccugccagtt

SEQ ID NO: 1857 - DNA, 21 bp, Artificial Sequence
  Description of Artificial Sequence: Target Sequence/siNA antisense region (stab22)
  misc_feature (21)..(21): 3'-3 attached terminal deoxyabasic moiety, inverted abasic, inverted nucleotide or other terminal cap that is optionally present
  misc_feature (20)..(20): Phosphorothioate or Phosphorodithioate 3'-Internucleotide Linkage (optionally present)
  misc_feature (1)..(19): ribonucleotide unmodified or modified as described for this sequence
ccccugcccggccugccagtt

SEQ ID NO: 1858 - DNA, 21 bp, Artificial Sequence
  Description of Artificial Sequence: Target Sequence/siNA antisense region (stab25)
  misc_feature (4)..(5): 2'-deoxy-2'Fluoro
  misc_feature (6)..(6): 2'-O-methyl
  misc_feature (7)..(9): 2'-deoxy-2'Fluoro
  misc_feature (10)..(11): 2'-O-methyl
  misc_feature (12)..(14): 2'-deoxy-2'Fluoro
  misc_feature (15)..(15): 2'-O-methyl
  misc_feature (16)..(17): 2'-deoxy-2'Fluoro
  misc_feature (18)..(19): 2'-O-methyl
  misc_feature (20)..(20): Phosphorothioate or Phosphorodithioate 3'-Internucleotide Linkage (optionally present)
  misc_feature (1)..(19): ribonucleotide unmodified or modified as described for this sequence
ccccugcccggccugccagtt

SEQ ID NO: 1859 - RNA, 21 nt, Artificial Sequence
  Description of Artificial Sequence: Target Sequence/siNA antisense region (stab35)
  misc_feature (4)..(5): 2'-deoxy-2'Fluoro
  misc_feature (6)..(6): 2'-O-methyl
  misc_feature (7)..(9): 2'-deoxy-2'Fluoro
  misc_feature (10)..(11): 2'-O-methyl
  misc_feature (12)..(14): 2'-deoxy-2'Fluoro
  misc_feature (15)..(15): 2'-O-methyl
  misc_feature (16)..(17): 2'-deoxy-2'Fluoro
  misc_feature (18)..(21): 2'-O-methyl
ccccugcccggccugccaguu

SEQ ID NO: 1860 - RNA, 21 nt, Artificial Sequence
  Description of Artificial Sequence: Target Sequence/siNA antisense region (stab36)
  misc_feature (4)..(5): 2'-deoxy-2'Fluoro
  misc_feature (6)..(6): 2'-O-methyl
  misc_feature (7)..(9): 2'-deoxy-2'Fluoro
  misc_feature (10)..(11): 2'-O-methyl
  misc_feature (12)..(14): 2'-deoxy-2'Fluoro
  misc_feature (15)..(15): 2'-O-methyl
  misc_feature (16)..(17): 2'-deoxy-2'Fluoro
  misc_feature (18)..(21): 2'-O-methyl
ccccugcccggccugccagcc

SEQ ID NO: 1861 - RNA, 19 nt, Artificial Sequence
  Description of Artificial Sequence: Target Sequence/siNA sense region
ggccugcagcaggacugug

SEQ ID NO: 1862 - RNA, 19 nt, Artificial Sequence
  Description of Artificial Sequence: Target Sequence/siNA antisense region
cacaguccugcugcaggcc

SEQ ID NO: 1863 - DNA, 21 bp, Artificial Sequence
  Description of Artificial Sequence: Target Sequence/siNA sense region (stab00)
  misc_feature (1)..(19): ribonucleotide unmodified or modified as described for this sequence
ggccugcagcaggacugugtt

SEQ ID NO: 1864 - DNA, 21 bp, Artificial Sequence
  Description of Artificial Sequence: Target Sequence/siNA antisense region (stab00as)
  misc_feature (1)..(19): ribonucleotide unmodified or modified as described for this sequence
cacaguccugcugcaggcctt

SEQ ID NO: 1865 - DNA, 21 bp, Artificial Sequence
  Description of Artificial Sequence: Target Sequence/siNA sense region (stab04)
  misc_feature (1)..(1): 5'-3 attached terminal deoxyabasic moiety, inverted abasic, inverted nucleotide or other terminal cap that is optionally present
  misc_feature (21)..(21): 3'-3 attached terminal deoxyabasic moiety, inverted abasic, inverted nucleotide or other terminal cap that is optionally present
  misc_feature (3)..(5): 2'-deoxy-2'Fluoro
  misc_feature (7)..(7): 2'-deoxy-2'Fluoro
  misc_feature (10)..(10): 2'-deoxy-2'Fluoro
  misc_feature (15)..(16): 2'-deoxy-2'Fluoro
  misc_feature (18)..(18): 2'-deoxy-2'Fluoro
  misc_feature (1)..(19): ribonucleotide unmodified or modified as described for this sequence
ggccugcagcaggacugugtt

SEQ ID NO: 1866 - DNA, 21 bp, Artificial Sequence
  Description of Artificial Sequence: Target Sequence/siNA antisense region (stab05)
  misc_feature (1)..(1): 2'-deoxy-2'Fluoro
  misc_feature (3)..(3): 2'-deoxy-2'Fluoro
  misc_feature (6)..(9): 2'-deoxy-2'Fluoro
  misc_feature (11)..(12): 2'-deoxy-2'Fluoro
  misc_feature (14)..(14): 2'-deoxy-2'Fluoro
  misc_feature (18)..(19): 2'-deoxy-2'Fluoro
  misc_feature (20)..(20): Phosphorothioate or Phosphorodithioate 3'-Internucleotide Linkage (optionally present)
  misc_feature (1)..(19): ribonucleotide unmodified or modified as described for this sequence
cacaguccugcugcaggcctt

SEQ ID NO: 1867 - DNA, 21 bp, Artificial Sequence
  Description of Artificial Sequence: Target Sequence/siNA sense region (stab07)
  misc_feature (1)..(1): 5'-3 attached terminal deoxyabasic moiety, inverted abasic, inverted nucleotide or other terminal cap that is optionally present
  misc_feature (21)..(21): 3'-3 attached terminal deoxyabasic moiety, inverted abasic, inverted nucleotide or other terminal cap that is optionally present
  misc_feature (3)..(5): 2'-deoxy-2'Fluoro
  misc_feature (7)..(7): 2'-deoxy-2'Fluoro
  misc_feature (10)..(10): 2'-deoxy-2'Fluoro
  misc_feature (15)..(16): 2'-deoxy-2'Fluoro
  misc_feature (18)..(18): 2'-deoxy-2'Fluoro
  misc_feature (1)..(19): ribonucleotide unmodified or modified as described for this sequence
ggccugcagcaggacugugtt

SEQ ID NO: 1868 - DNA, 21 bp, Artificial Sequence
  Description of Artificial Sequence: Target Sequence/siNA antisense region (stab08)
  misc_feature (1)..(1): 2'-deoxy-2'Fluoro
  misc_feature (2)..(2): 2'-O-methyl
  misc_feature (3)..(3): 2'-deoxy-2'Fluoro
  misc_feature (4)..(5): 2'-O-methyl
  misc_feature (6)..(9): 2'-deoxy-2'Fluoro
  misc_feature (10)..(10): 2'-O-methyl
  misc_feature (11)..(12): 2'-deoxy-2'Fluoro
  misc_feature (13)..(13): 2'-O-methyl
  misc_feature (14)..(14): 2'-deoxy-2'Fluoro
  misc_feature (15)..(17): 2'-O-methyl
  misc_feature (18)..(19): 2'-deoxy-2'Fluoro
  misc_feature (20)..(20): Phosphorothioate or Phosphorodithioate 3'-Internucleotide Linkage (optionally present)
  misc_feature (1)..(19): ribonucleotide unmodified or modified as described for this sequence
cacaguccugcugcaggcctt

SEQ ID NO: 1869 - DNA, 21 bp, Artificial Sequence
  Description of Artificial Sequence: Target Sequence/siNA sense region (stab09)
  misc_feature (1)..(1): 5'-3 attached terminal deoxyabasic moiety, inverted abasic, inverted nucleotide or other terminal cap that is optionally present
  misc_feature (21)..(21): 3'-3 attached terminal deoxyabasic moiety, inverted abasic, inverted nucleotide or other terminal cap that is optionally present
  misc_feature (1)..(19): ribonucleotide unmodified or modified as described for this sequence
ggccugcagcaggacugugtt

SEQ ID NO: 1870 - DNA, 21 bp, Artificial Sequence
  Description of Artificial Sequence: Target Sequence/siNA antisense region (stab10)
  misc_feature (20)..(20): Phosphorothioate or Phosphorodithioate 3'-Internucleotide Linkage (optionally present)
  misc_feature (1)..(19): ribonucleotide unmodified or modified as described for this sequence
cacaguccugcugcaggcctt

SEQ ID NO: 1871 - DNA, 21 bp, Artificial Sequence
  Description of Artificial Sequence: Target Sequence/siNA antisense region (stab19)
  misc_feature (21)..(21): 3'-3 attached terminal deoxyabasic moiety, inverted abasic, inverted nucleotide or other terminal cap that is optionally present
  misc_feature (1)..(1): 2'-deoxy-2'Fluoro
  misc_feature (2)..(2): 2'-O-methyl
  misc_feature (3)..(3): 2'-deoxy-2'Fluoro
  misc_feature (4)..(5): 2'-O-methyl
  misc_feature (6)..(9): 2'-deoxy-2'Fluoro
  misc_feature (10)..(10): 2'-O-methyl
  misc_feature (11)..(12): 2'-deoxy-2'Fluoro
  misc_feature (13)..(13): 2'-O-methyl
  misc_feature (14)..(14): 2'-deoxy-2'Fluoro
  misc_feature (15)..(17): 2'-O-methyl
  misc_feature (18)..(19): 2'-deoxy-2'Fluoro
  misc_feature (1)..(19): ribonucleotide unmodified or modified as described for this sequence
cacaguccugcugcaggcctt

SEQ ID NO: 1872 - DNA, 21 bp, Artificial Sequence
  Description of Artificial Sequence: Target Sequence/siNA antisense region (stab22)
  misc_feature (21)..(21): 3'-3 attached terminal deoxyabasic moiety, inverted abasic, inverted nucleotide or other terminal cap that is optionally present
  misc_feature (20)..(20): Phosphorothioate or Phosphorodithioate 3'-Internucleotide Linkage (optionally present)
  misc_feature (1)..(19): ribonucleotide unmodified or modified as described for this sequence
cacaguccugcugcaggcctt

SEQ ID NO: 1873 - DNA, 21 bp, Artificial Sequence
  Description of Artificial Sequence: Target Sequence/siNA antisense region (stab25)
  misc_feature (4)..(5): 2'-O-methyl
  misc_feature (6)..(9): 2'-deoxy-2'Fluoro
  misc_feature (10)..(10): 2'-O-methyl
  misc_feature (11)..(12): 2'-deoxy-2'Fluoro
  misc_feature (13)..(13): 2'-O-methyl
  misc_feature (14)..(14): 2'-deoxy-2'Fluoro
  misc_feature (15)..(17): 2'-O-methyl
  misc_feature (18)..(19): 2'-deoxy-2'Fluoro
  misc_feature (20)..(20): Phosphorothioate or Phosphorodithioate 3'-Internucleotide Linkage (optionally present)
  misc_feature (1)..(19): ribonucleotide unmodified or modified as described for this sequence
cacaguccugcugcaggcctt

SEQ ID NO: 1874 - RNA, 21 nt, Artificial Sequence
  Description of Artificial Sequence: Target Sequence/siNA antisense region (stab35)
  misc_feature (4)..(5): 2'-O-methyl
  misc_feature (6)..(9): 2'-deoxy-2'Fluoro
  misc_feature (10)..(10): 2'-O-methyl
  misc_feature (11)..(12): 2'-deoxy-2'Fluoro
  misc_feature (13)..(13): 2'-O-methyl
  misc_feature (14)..(14): 2'-deoxy-2'Fluoro
  misc_feature (15)..(17): 2'-O-methyl
  misc_feature (18)..(19): 2'-deoxy-2'Fluoro
  misc_feature (20)..(21): 2'-O-methyl
cacaguccugcugcaggccuu

SEQ ID NO: 1875 - RNA, 21 nt, Artificial Sequence
  Description of Artificial Sequence: Target Sequence/siNA antisense region (stab36)
  misc_feature (4)..(5): 2'-O-methyl
  misc_feature (6)..(9): 2'-deoxy-2'Fluoro
  misc_feature (10)..(10): 2'-O-methyl
  misc_feature (11)..(12): 2'-deoxy-2'Fluoro
  misc_feature (13)..(13): 2'-O-methyl
  misc_feature (14)..(14): 2'-deoxy-2'Fluoro
  misc_feature (15)..(17): 2'-O-methyl
  misc_feature (18)..(19): 2'-deoxy-2'Fluoro
  misc_feature (20)..(21): 2'-O-methyl
cacaguccugcugcaggcccc

SEQ ID NO: 1876 - RNA, 19 nt, Artificial Sequence
  Description of Artificial Sequence: Target Sequence/siNA sense region
gcucugcgaguggaugcua

SEQ ID NO: 1877 - RNA, 19 nt, Artificial Sequence
  Description of Artificial Sequence: Target Sequence/siNA antisense region
uagcauccacucgcagagc

SEQ ID NO: 1878 - DNA, 21 bp, Artificial Sequence
  Description of Artificial Sequence: Target Sequence/siNA sense region (stab00)
  misc_feature (1)..(19): ribonucleotide unmodified or modified as described for this sequence
gcucugcgaguggaugcuatt

SEQ ID NO: 1879 - DNA, 21 bp, Artificial Sequence
  Description of Artificial Sequence: Target Sequence/siNA antisense region (stab00as)
  misc_feature (1)..(19): ribonucleotide unmodified or modified as described for this sequence
uagcauccacucgcagagctt

SEQ ID NO: 1880 - DNA, 21 bp, Artificial Sequence
  Description of Artificial Sequence: Target Sequence/siNA sense region (stab04)
  misc_feature (1)..(1): 5'-3 attached terminal deoxyabasic moiety, inverted abasic, inverted nucleotide or other terminal cap that is optionally present
  misc_feature (21)..(21): 3'-3 attached terminal deoxyabasic moiety, inverted abasic, inverted nucleotide or other terminal cap that is optionally present
  misc_feature (2)..(5): 2'-deoxy-2'Fluoro
  misc_feature (7)..(7): 2'-deoxy-2'Fluoro
  misc_feature (11)..(11): 2'-deoxy-2'Fluoro
  misc_feature (15)..(15): 2'-deoxy-2'Fluoro
  misc_feature (17)..(18): 2'-deoxy-2'Fluoro
  misc_feature (1)..(19): ribonucleotide unmodified or modified as described for this sequence
gcucugcgaguggaugcuatt

SEQ ID NO: 1881 - DNA, 21 bp, Artificial Sequence
  Description of Artificial Sequence: Target Sequence/siNA antisense region (stab05)
  misc_feature (1)..(1): 2'-deoxy-2'Fluoro
  misc_feature (4)..(4): 2'-deoxy-2'Fluoro
  misc_feature (6)..(8): 2'-deoxy-2'Fluoro
  misc_feature (10)..(12): 2'-deoxy-2'Fluoro
  misc_feature (14)..(14): 2'-deoxy-2'Fluoro
  misc_feature (19)..(19): 2'-deoxy-2'Fluoro
  misc_feature (20)..(20): Phosphorothioate or Phosphorodithioate 3'-Internucleotide Linkage (optionally present)
  misc_feature (1)..(19): ribonucleotide unmodified or modified as described for this sequence
uagcauccacucgcagagctt

SEQ ID NO: 1882 - DNA, 21 bp, Artificial Sequence
  Description of Artificial Sequence: Target Sequence/siNA sense region (stab07)
  misc_feature (1)..(1): 5'-3 attached terminal deoxyabasic moiety, inverted abasic, inverted nucleotide or other terminal cap that is optionally present
  misc_feature (21)..(21): 3'-3 attached terminal deoxyabasic moiety, inverted abasic, inverted nucleotide or other terminal cap that is optionally present
  misc_feature (2)..(5): 2'-deoxy-2'Fluoro
  misc_feature (7)..(7): 2'-deoxy-2'Fluoro
  misc_feature (11)..(11): 2'-deoxy-2'Fluoro
  misc_feature (15)..(15): 2'-deoxy-2'Fluoro
  misc_feature (17)..(18): 2'-deoxy-2'Fluoro
  misc_feature (1)..(19): ribonucleotide unmodified or modified as described for this sequence
gcucugcgaguggaugcuatt

SEQ ID NO: 1883 - DNA, 21 bp, Artificial Sequence
  Description of Artificial Sequence: Target Sequence/siNA antisense region (stab08)
  misc_feature (1)..(1): 2'-deoxy-2'Fluoro
  misc_feature (2)..(3): 2'-O-methyl
  misc_feature (4)..(4): 2'-deoxy-2'Fluoro
  misc_feature (5)..(5): 2'-O-methyl
  misc_feature (6)..(8): 2'-deoxy-2'Fluoro
  misc_feature (9)..(9): 2'-O-methyl
  misc_feature (10)..(12): 2'-deoxy-2'Fluoro
  misc_feature (13)..(13): 2'-O-methyl
  misc_feature (14)..(14): 2'-deoxy-2'Fluoro
  misc_feature (15)..(18): 2'-O-methyl
  misc_feature (19)..(19): 2'-deoxy-2'Fluoro
  misc_feature (20)..(20): Phosphorothioate or Phosphorodithioate 3'-Internucleotide Linkage (optionally present)
  misc_feature (1)..(19): ribonucleotide unmodified or modified as described for this sequence
uagcauccacucgcagagctt

SEQ ID NO: 1884 - DNA, 21 bp, Artificial Sequence
  Description of Artificial Sequence: Target Sequence/siNA sense region (stab09)
  misc_feature (1)..(1): 5'-3 attached terminal deoxyabasic moiety, inverted abasic, inverted nucleotide or other terminal cap that is optionally present
  misc_feature (21)..(21): 3'-3 attached terminal deoxyabasic moiety, inverted abasic, inverted nucleotide or other terminal cap that is optionally present
  misc_feature (1)..(19): ribonucleotide unmodified or modified as described for this sequence
gcucugcgaguggaugcuatt

SEQ ID NO: 1885 - DNA, 21 bp, Artificial Sequence
  Description of Artificial Sequence: Target Sequence/siNA antisense region (stab10)
  misc_feature (20)..(20): Phosphorothioate or Phosphorodithioate 3'-Internucleotide Linkage (optionally present)
  misc_feature (1)..(19): ribonucleotide unmodified or modified as described for this sequence
uagcauccacucgcagagctt

SEQ ID NO: 1886 - DNA, 21 bp, Artificial Sequence
  Description of Artificial Sequence: Target Sequence/siNA antisense region (stab19)
  misc_feature (21)..(21): 3'-3 attached terminal deoxyabasic moiety, inverted abasic, inverted nucleotide or other terminal cap that is optionally present
  misc_feature (1)..(1): 2'-deoxy-2'Fluoro
  misc_feature (2)..(3): 2'-O-methyl
  misc_feature (4)..(4): 2'-deoxy-2'Fluoro
  misc_feature (5)..(5): 2'-O-methyl
  misc_feature (6)..(8): 2'-deoxy-2'Fluoro
  misc_feature (9)..(9): 2'-O-methyl
  misc_feature (10)..(12): 2'-deoxy-2'Fluoro
  misc_feature (13)..(13): 2'-O-methyl
  misc_feature (14)..(14): 2'-deoxy-2'Fluoro
  misc_feature (15)..(18): 2'-O-methyl
  misc_feature (19)..(19): 2'-deoxy-2'Fluoro
  misc_feature (1)..(19): ribonucleotide unmodified or modified as described for this sequence
uagcauccacucgcagagctt

SEQ ID NO: 1887 - DNA, 21 bp, Artificial Sequence
  Description of Artificial Sequence: Target Sequence/siNA antisense region (stab22)
  misc_feature (21)..(21): 3'-3 attached terminal deoxyabasic moiety, inverted abasic, inverted nucleotide or other terminal cap that is optionally present
  misc_feature (20)..(20): Phosphorothioate or Phosphorodithioate 3'-Internucleotide Linkage (optionally present)
  misc_feature (1)..(19): ribonucleotide unmodified or modified as described for this sequence
uagcauccacucgcagagctt

SEQ ID NO: 1888 - DNA, 21 bp, Artificial Sequence
  Description of Artificial Sequence: Target Sequence/siNA antisense region (stab25)
  misc_feature (4)..(4): 2'-deoxy-2'Fluoro
  misc_feature (5)..(5): 2'-O-methyl
  misc_feature (6)..(8): 2'-deoxy-2'Fluoro
  misc_feature (9)..(9): 2'-O-methyl
  misc_feature (10)..(12): 2'-deoxy-2'Fluoro
  misc_feature (13)..(13): 2'-O-methyl
  misc_feature (14)..(14): 2'-deoxy-2'Fluoro
  misc_feature (15)..(18): 2'-O-methyl
  misc_feature (19)..(19): 2'-deoxy-2'Fluoro
  misc_feature (20)..(20): Phosphorothioate or Phosphorodithioate 3'-Internucleotide Linkage (optionally present)
  misc_feature (1)..(19): ribonucleotide unmodified or modified as described for this sequence
uagcauccacucgcagagctt

SEQ ID NO: 1889 - RNA, 21 nt, Artificial Sequence
  Description of Artificial Sequence: Target Sequence/siNA antisense region (stab35)
  misc_feature (4)..(4): 2'-deoxy-2'Fluoro
  misc_feature (5)..(5): 2'-O-methyl
  misc_feature (6)..(8): 2'-deoxy-2'Fluoro
  misc_feature (9)..(9): 2'-O-methyl
  misc_feature (10)..(12): 2'-deoxy-2'Fluoro
  misc_feature (13)..(13): 2'-O-methyl
  misc_feature (14)..(14): 2'-deoxy-2'Fluoro
  misc_feature (15)..(18): 2'-O-methyl
  misc_feature (19)..(19): 2'-deoxy-2'Fluoro
  misc_feature (20)..(21): 2'-O-methyl
uagcauccacucgcagagcuu

SEQ ID NO: 1890 - RNA, 21 nt, Artificial Sequence
  Description of Artificial Sequence: Target Sequence/siNA antisense region (stab36)
  misc_feature (4)..(4): 2'-deoxy-2'Fluoro
  misc_feature (5)..(5): 2'-O-methyl
  misc_feature (6)..(8): 2'-deoxy-2'Fluoro
  misc_feature (9)..(9): 2'-O-methyl
  misc_feature (10)..(12): 2'-deoxy-2'Fluoro
  misc_feature (13)..(13): 2'-O-methyl
  misc_feature (14)..(14): 2'-deoxy-2'Fluoro
  misc_feature (15)..(18): 2'-O-methyl
  misc_feature (19)..(19): 2'-deoxy-2'Fluoro
  misc_feature (20)..(21): 2'-O-methyl
uagcauccacucgcagagcac

SEQ ID NO: 1891 - RNA, 19 nt, Artificial Sequence
  Description of Artificial Sequence: Target Sequence/siNA sense region
agcgccagcgcccgagacg

SEQ ID NO: 1892 - RNA, 19 nt, Artificial Sequence
  Description of Artificial Sequence: Target Sequence/siNA antisense region
cgucucgggcgcuggcgcu

SEQ ID NO: 1893 - DNA, 21 bp, Artificial Sequence
  Description of Artificial Sequence: Target Sequence/siNA sense region (stab00)
  misc_feature (1)..(19): ribonucleotide unmodified or modified as described for this sequence
agcgccagcgcccgagacgtt

SEQ ID NO: 1894 - DNA, 21 bp, Artificial Sequence
  Description of Artificial Sequence: Target Sequence/siNA antisense region (stab00as)
  misc_feature (1)..(19): ribonucleotide unmodified or modified as described for this sequence
cgucucgggcgcuggcgcutt

SEQ ID NO: 1895 - DNA, 21 bp, Artificial Sequence
  Description of Artificial Sequence: Target Sequence/siNA sense region (stab04)
  misc_feature (1)..(1): 5'-3 attached terminal deoxyabasic moiety, inverted abasic, inverted nucleotide or other terminal cap that is optionally present
  misc_feature (21)..(21): 3'-3 attached terminal deoxyabasic moiety, inverted abasic, inverted nucleotide or other terminal cap that is optionally present
  misc_feature (3)..(3): 2'-deoxy-2'Fluoro
  misc_feature (5)..(6): 2'-deoxy-2'Fluoro
  misc_feature (9)..(9): 2'-deoxy-2'Fluoro
  misc_feature (11)..(13): 2'-deoxy-2'Fluoro
  misc_feature (18)..(18): 2'-deoxy-2'Fluoro
  misc_feature (1)..(19): ribonucleotide unmodified or modified as described for this sequence
agcgccagcgcccgagacgtt

SEQ ID NO: 1896 - DNA, 21 bp, Artificial Sequence
  Description of Artificial Sequence: Target Sequence/siNA antisense region (stab05)
  misc_feature (1)..(1): 2'-deoxy-2'Fluoro
  misc_feature (3)..(6): 2'-deoxy-2'Fluoro
  misc_feature (10)..(10): 2'-deoxy-2'Fluoro
  misc_feature (12)..(13): 2'-deoxy-2'Fluoro
  misc_feature (16)..(16): 2'-deoxy-2'Fluoro
  misc_feature (18)..(19): 2'-deoxy-2'Fluoro
  misc_feature (20)..(20): Phosphorothioate or Phosphorodithioate 3'-Internucleotide Linkage (optionally present)
  misc_feature (1)..(19): ribonucleotide unmodified or modified as described for this sequence
cgucucgggcgcuggcgcutt

SEQ ID NO: 1897 - DNA, 21 bp, Artificial Sequence
  Description of Artificial Sequence: Target Sequence/siNA sense region (stab07)
  misc_feature (1)..(1): 5'-3 attached terminal deoxyabasic moiety, inverted abasic, inverted nucleotide or other terminal cap that is optionally present
  misc_feature (21)..(21): 3'-3 attached terminal deoxyabasic moiety, inverted abasic, inverted nucleotide or other terminal cap that is optionally present
  misc_feature (3)..(3): 2'-deoxy-2'Fluoro
  misc_feature (5)..(6): 2'-deoxy-2'Fluoro
  misc_feature (9)..(9): 2'-deoxy-2'Fluoro
  misc_feature (11)..(13): 2'-deoxy-2'Fluoro
  misc_feature (18)..(18): 2'-deoxy-2'Fluoro
agcgccagcgcccgagacgtt

SEQ ID NO: 1898 - DNA, 21 bp, Artificial Sequence
  Description of Artificial Sequence: Target Sequence/siNA antisense region (stab08)
  misc_feature (1)..(1): 2'-deoxy-2'Fluoro
  misc_feature (2)..(2): 2'-O-methyl
  misc_feature (3)..(6): 2'-deoxy-2'Fluoro
  misc_feature (7)..(9): 2'-O-methyl
  misc_feature (10)..(10): 2'-deoxy-2'Fluoro
  misc_feature (11)..(11): 2'-O-methyl
  misc_feature (12)..(13): 2'-deoxy-2'Fluoro
  misc_feature (14)..(15): 2'-O-methyl
  misc_feature (16)..(16): 2'-deoxy-2'Fluoro
  misc_feature (17)..(17): 2'-O-methyl
  misc_feature (18)..(19): 2'-deoxy-2'Fluoro
  misc_feature (20)..(20): Phosphorothioate or Phosphorodithioate 3'-Internucleotide Linkage (optionally present)
  misc_feature (1)..(19): ribonucleotide unmodified or modified as described for this sequence
cgucucgggcgcuggcgcutt

SEQ ID NO: 1899 - DNA, 21 bp, Artificial Sequence
  Description of Artificial Sequence: Target Sequence/siNA sense region (stab09)
  misc_feature (1)..(1): 5'-3 attached terminal deoxyabasic moiety, inverted abasic, inverted nucleotide or other terminal cap that is optionally present
  misc_feature (21)..(21): 3'-3 attached terminal deoxyabasic moiety, inverted abasic, inverted nucleotide or other terminal cap that is optionally present
  misc_feature (1)..(19): ribonucleotide unmodified or modified as described for this sequence
agcgccagcgcccgagacgtt

SEQ ID NO: 1900 - DNA, 21 bp, Artificial Sequence
  Description of Artificial Sequence: Target Sequence/siNA antisense region (stab10)
  misc_feature (20)..(20): Phosphorothioate or Phosphorodithioate 3'-Internucleotide Linkage (optionally present)
  misc_feature (1)..(19): ribonucleotide unmodified or modified as described for this sequence
cgucucgggcgcuggcgcutt

SEQ ID NO: 1901 - DNA, 21 bp, Artificial Sequence
  Description of Artificial Sequence: Target Sequence/siNA antisense region (stab19)
  misc_feature (21)..(21): 3'-3 attached terminal deoxyabasic moiety, inverted abasic, inverted nucleotide or other terminal cap that is optionally present
  misc_feature (1)..(1): 2'-deoxy-2'Fluoro
  misc_feature (2)..(2): 2'-O-methyl
  misc_feature (3)..(6): 2'-deoxy-2'Fluoro
  misc_feature (7)..(9): 2'-O-methyl
  misc_feature (10)..(10): 2'-deoxy-2'Fluoro
  misc_feature (11)..(11): 2'-O-methyl
  misc_feature (12)..(13): 2'-deoxy-2'Fluoro
  misc_feature (14)..(15): 2'-O-methyl
  misc_feature (16)..(16): 2'-deoxy-2'Fluoro
  misc_feature (17)..(17): 2'-O-methyl
  misc_feature (18)..(19): 2'-deoxy-2'Fluoro
  misc_feature (1)..(19): ribonucleotide unmodified or modified as described for this sequence
cgucucgggcgcuggcgcutt

SEQ ID NO: 1902 - DNA, 21 bp, Artificial Sequence
  Description of Artificial Sequence: Target Sequence/siNA antisense region (stab22)
  misc_feature (21)..(21): 3'-3 attached terminal deoxyabasic moiety, inverted abasic, inverted nucleotide or other terminal cap that is optionally present
  misc_feature (20)..(20): Phosphorothioate or Phosphorodithioate 3'-Internucleotide Linkage (optionally present)
  misc_feature (1)..(19): ribonucleotide unmodified or modified as described for this sequence
cgucucgggcgcuggcgcutt

SEQ ID NO: 1903 - DNA, 21 bp, Artificial Sequence
  Description of Artificial Sequence: Target Sequence/siNA antisense region (stab25)
  misc_feature (4)..(6): 2'-deoxy-2'Fluoro
  misc_feature (7)..(9): 2'-O-methyl
  misc_feature (10)..(10): 2'-deoxy-2'Fluoro
  misc_feature (11)..(11): 2'-O-methyl
  misc_feature (12)..(13): 2'-deoxy-2'Fluoro
  misc_feature (14)..(15): 2'-O-methyl
  misc_feature (16)..(16): 2'-deoxy-2'Fluoro
  misc_feature (17)..(17): 2'-O-methyl
  misc_feature (18)..(19): 2'-deoxy-2'Fluoro
  misc_feature (20)..(20): Phosphorothioate or Phosphorodithioate 3'-Internucleotide Linkage (optionally present)
  misc_feature (1)..(19): ribonucleotide unmodified or modified as described for this sequence
cgucucgggcgcuggcgcutt

SEQ ID NO: 1904 - RNA, 21 nt, Artificial Sequence
  Description of Artificial Sequence: Target Sequence/siNA antisense region (stab35)
  misc_feature (4)..(6): 2'-deoxy-2'Fluoro
  misc_feature (7)..(9): 2'-O-methyl
  misc_feature (10)..(10): 2'-deoxy-2'Fluoro
  misc_feature (11)..(11): 2'-O-methyl
  misc_feature (12)..(13): 2'-deoxy-2'Fluoro
  misc_feature (14)..(15): 2'-O-methyl
  misc_feature (16)..(16): 2'-deoxy-2'Fluoro
  misc_feature (17)..(17): 2'-O-methyl
  misc_feature (18)..(19): 2'-deoxy-2'Fluoro
  misc_feature (20)..(21): 2'-O-methyl
cgucucgggcgcuggcgcuuu

SEQ ID NO: 1905 - RNA, 21 nt, Artificial Sequence
  Description of Artificial Sequence: Target Sequence/siNA antisense region (stab36)
  misc_feature (4)..(6): 2'-deoxy-2'Fluoro
  misc_feature (7)..(9): 2'-O-methyl
  misc_feature (10)..(10): 2'-deoxy-2'Fluoro
  misc_feature (11)..(11): 2'-O-methyl
  misc_feature (12)..(13): 2'-deoxy-2'Fluoro
  misc_feature (14)..(15): 2'-O-methyl
  misc_feature (16)..(16): 2'-deoxy-2'Fluoro
  misc_feature (17)..(17): 2'-O-methyl
  misc_feature (18)..(19): 2'-deoxy-2'Fluoro
  misc_feature (20)..(21): 2'-O-methyl
cgucucgggcgcuggcgcuag

SEQ ID NO: 1906 - RNA, 19 nt, Artificial Sequence
  Description of Artificial Sequence: Target Sequence/siNA sense region
gcagcccuggucuaccaua

SEQ ID NO: 1907 - RNA, 19 nt, Artificial Sequence
  Description of Artificial Sequence: Target Sequence/siNA antisense region
uaugguagaccagggcugc

SEQ ID NO: 1908 - DNA, 21 bp, Artificial Sequence
  Description of Artificial Sequence: Target Sequence/siNA sense region (stab00)
  misc_feature (1)..(19): ribonucleotide unmodified or modified as described for this sequence
gcagcccuggucuaccauatt

SEQ ID NO: 1909 - DNA, 21 bp, Artificial Sequence
  Description of Artificial Sequence: Target Sequence/siNA antisense region (stab00as)
  misc_feature (1)..(19): ribonucleotide unmodified or modified as described for this sequence
uaugguagaccagggcugctt

SEQ ID NO: 1910 - DNA, 21 bp, Artificial Sequence
  Description of Artificial Sequence: Target Sequence/siNA sense region (stab04)
  misc_feature (1)..(1): 5'-3 attached terminal deoxyabasic moiety, inverted abasic, inverted nucleotide or other terminal cap that is optionally present
  misc_feature (21)..(21): 3'-3 attached terminal deoxyabasic moiety, inverted abasic, inverted nucleotide or other terminal cap that is optionally present
  misc_feature (2)..(2): 2'-deoxy-2'Fluoro
  misc_feature (5)..(8): 2'-deoxy-2'Fluoro
  misc_feature (11)..(13): 2'-deoxy-2'Fluoro
  misc_feature (15)..(16): 2'-deoxy-2'Fluoro
  misc_feature (18)..(18): 2'-deoxy-2'Fluoro
  misc_feature (1)..(19): ribonucleotide unmodified or modified as described for this sequence
gcagcccuggucuaccauatt

SEQ ID NO: 1911 - DNA, 21 bp, Artificial Sequence
  Description of Artificial Sequence: Target Sequence/siNA antisense region (stab05)
  misc_feature (1)..(1): 2'-deoxy-2'Fluoro
  misc_feature (3)..(3): 2'-deoxy-2'Fluoro
  misc_feature (6)..(6): 2'-deoxy-2'Fluoro
  misc_feature (10)..(11): 2'-deoxy-2'Fluoro
  misc_feature (16)..(17): 2'-deoxy-2'Fluoro
  misc_feature (19)..(19): 2'-deoxy-2'Fluoro
  misc_feature (20)..(20): Phosphorothioate or Phosphorodithioate 3'-Internucleotide Linkage (optionally present)
  misc_feature (1)..(19): ribonucleotide unmodified or modified as described for this sequence
uaugguagaccagggcugctt

SEQ ID NO: 1912 - DNA, 21 bp, Artificial Sequence
  Description of Artificial Sequence: Target Sequence/siNA sense region (stab07)
  misc_feature (1)..(1): 5'-3 attached terminal deoxyabasic moiety, inverted abasic, inverted nucleotide or other terminal cap that is optionally present
  misc_feature (21)..(21): 3'-3 attached terminal deoxyabasic moiety, inverted abasic, inverted nucleotide or other terminal cap that is optionally present
  misc_feature (2)..(2): 2'-deoxy-2'Fluoro
  misc_feature (5)..(8): 2'-deoxy-2'Fluoro
  misc_feature (11)..(13): 2'-deoxy-2'Fluoro
  misc_feature (15)..(16): 2'-deoxy-2'Fluoro
  misc_feature (18)..(18): 2'-deoxy-2'Fluoro
gcagcccuggucuaccauatt

SEQ ID NO: 1913 - DNA, 21 bp, Artificial Sequence
  Description of Artificial Sequence: Target Sequence/siNA antisense region (stab08)
  misc_feature (1)..(1): 2'-deoxy-2'Fluoro
  misc_feature (2)..(2): 2'-O-methyl
  misc_feature (3)..(3): 2'-deoxy-2'Fluoro
  misc_feature (4)..(5): 2'-O-methyl
  misc_feature (6)..(6): 2'-deoxy-2'Fluoro
  misc_feature (7)..(9): 2'-O-methyl
  misc_feature (10)..(11): 2'-deoxy-2'Fluoro
  misc_feature (12)..(15): 2'-O-methyl
  misc_feature (16)..(17): 2'-deoxy-2'Fluoro
  misc_feature (18)..(18): 2'-O-methyl
  misc_feature (19)..(19): 2'-deoxy-2'Fluoro
  misc_feature (20)..(20): Phosphorothioate or Phosphorodithioate 3'-Internucleotide Linkage (optionally present)
uaugguagaccagggcugctt

SEQ ID NO: 1914 - DNA, 21 bp, Artificial Sequence
  Description of Artificial Sequence: Target Sequence/siNA sense region (stab09)
  misc_feature (1)..(1): 5'-3 attached terminal deoxyabasic moiety, inverted abasic, inverted nucleotide or other terminal cap that is optionally present
  misc_feature (21)..(21): 3'-3 attached terminal deoxyabasic moiety, inverted abasic, inverted nucleotide or other terminal cap that is optionally present
  misc_feature (1)..(19): ribonucleotide unmodified or modified as described for this sequence
gcagcccuggucuaccauatt

SEQ ID NO: 1915 - DNA, 21 bp, Artificial Sequence
  Description of Artificial Sequence: Target Sequence/siNA antisense region (stab10)
  misc_feature (20)..(20): Phosphorothioate or Phosphorodithioate 3'-Internucleotide Linkage (optionally present)
  misc_feature (1)..(19): ribonucleotide unmodified or modified as described for this sequence
uaugguagaccagggcugctt

SEQ ID NO: 1916 - DNA, 21 bp, Artificial Sequence
  Description of Artificial Sequence: Target Sequence/siNA antisense region (stab19)
  misc_feature (21)..(21): 3'-3 attached terminal deoxyabasic moiety, inverted abasic, inverted nucleotide or other terminal cap that is optionally present
  misc_feature (1)..(1): 2'-deoxy-2'Fluoro
  misc_feature (2)..(2): 2'-O-methyl
  misc_feature (3)..(3): 2'-deoxy-2'Fluoro
  misc_feature (4)..(5): 2'-O-methyl
  misc_feature (6)..(6): 2'-deoxy-2'Fluoro
  misc_feature (7)..(9): 2'-O-methyl
  misc_feature (10)..(11): 2'-deoxy-2'Fluoro
  misc_feature (12)..(15): 2'-O-methyl
  misc_feature (16)..(17): 2'-deoxy-2'Fluoro
  misc_feature (18)..(18): 2'-O-methyl
  misc_feature (19)..(19): 2'-deoxy-2'Fluoro
  misc_feature (1)..(19): ribonucleotide unmodified or modified as described for this sequence
uaugguagaccagggcugctt

SEQ ID NO: 1917 - DNA, 21 bp, Artificial Sequence
  Description of Artificial Sequence: Target Sequence/siNA antisense region (stab22)
  misc_feature (21)..(21): 3'-3 attached terminal deoxyabasic moiety, inverted abasic, inverted nucleotide or other terminal cap that is optionally present
  misc_feature (20)..(20): Phosphorothioate or Phosphorodithioate 3'-Internucleotide Linkage (optionally present)
  misc_feature (1)..(19): ribonucleotide unmodified or modified as described for this sequence
uaugguagaccagggcugctt

SEQ ID NO: 1918 - DNA, 21 bp, Artificial Sequence
  Description of Artificial Sequence: Target Sequence/siNA antisense region (stab25)
  misc_feature (4)..(5): 2'-O-methyl
  misc_feature (6)..(6): 2'-deoxy-2'Fluoro
  misc_feature (7)..(9): 2'-O-methyl
  misc_feature (10)..(11): 2'-deoxy-2'Fluoro
  misc_feature (12)..(15): 2'-O-methyl
  misc_feature (16)..(17): 2'-deoxy-2'Fluoro
  misc_feature (18)..(18): 2'-O-methyl
  misc_feature (19)..(19): 2'-deoxy-2'Fluoro
  misc_feature (20)..(20): Phosphorothioate or Phosphorodithioate 3'-Internucleotide Linkage (optionally present)
  misc_feature (1)..(19): ribonucleotide unmodified or modified as described for this sequence
uaugguagaccagggcugctt

SEQ ID NO: 1919 - RNA, 21 nt, Artificial Sequence
  Description of Artificial Sequence: Target Sequence/siNA antisense region (stab35)
  misc_feature (4)..(5): 2'-O-methyl
  misc_feature (6)..(6): 2'-deoxy-2'Fluoro
  misc_feature (7)..(9): 2'-O-methyl
  misc_feature (10)..(11): 2'-deoxy-2'Fluoro
  misc_feature (12)..(15): 2'-O-methyl
  misc_feature (16)..(17): 2'-deoxy-2'Fluoro
  misc_feature (18)..(18): 2'-O-methyl
  misc_feature (19)..(19): 2'-deoxy-2'Fluoro
  misc_feature (20)..(21): 2'-O-methyl
uaugguagaccagggcugcuu

SEQ ID NO: 1920 - RNA, 21 nt, Artificial Sequence
  Description of Artificial Sequence: Target Sequence/siNA antisense region (stab36)
  misc_feature (4)..(5): 2'-O-methyl
  misc_feature (6)..(6): 2'-deoxy-2'Fluoro
  misc_feature (7)..(9): 2'-O-methyl
  misc_feature (10)..(11): 2'-deoxy-2'Fluoro
  misc_feature (12)..(15): 2'-O-methyl
  misc_feature (16)..(17): 2'-deoxy-2'Fluoro
  misc_feature (18)..(18): 2'-O-methyl
  misc_feature (19)..(19): 2'-deoxy-2'Fluoro
  misc_feature (20)..(21): 2'-O-methyl
uaugguagaccagggcugcgu

SEQ ID NO: 1921 - RNA, 19 nt, Artificial Sequence
  Description of Artificial Sequence: Target Sequence/siNA sense region
aagcugcaccagcugcaca

SEQ ID NO: 1922 - RNA, 19 nt, Artificial Sequence
  Description of Artificial Sequence: Target Sequence/siNA antisense region
ugugcagcuggugcagcuu

SEQ ID NO: 1923 - DNA, 21 bp, Artificial Sequence
  Description of Artificial Sequence: Target Sequence/siNA sense region (stab00)
  misc_feature (1)..(19): ribonucleotide unmodified or modified as described for this sequence
aagcugcaccagcugcacatt

SEQ ID NO: 1924 - DNA, 21 bp, Artificial Sequence
  Description of Artificial Sequence: Target Sequence/siNA antisense region (stab00as)
  misc_feature (1)..(19): ribonucleotide unmodified or modified as described for this sequence
ugugcagcuggugcagcuutt

SEQ ID NO: 1925 - DNA, 21 bp, Artificial Sequence
  Description of Artificial Sequence: Target Sequence/siNA sense region (stab04)
  misc_feature (1)..(1): 5'-3 attached terminal deoxyabasic moiety, inverted abasic, inverted nucleotide or other terminal cap that is optionally present
  misc_feature (21)..(21): 3'-3 attached terminal deoxyabasic moiety, inverted abasic, inverted nucleotide or other terminal cap that is optionally present
  misc_feature (4)..(5): 2'-deoxy-2'Fluoro
  misc_feature (7)..(7): 2'-deoxy-2'Fluoro
  misc_feature (9)..(10): 2'-deoxy-2'Fluoro
  misc_feature (13)..(14): 2'-deoxy-2'Fluoro
  misc_feature (16)..(16): 2'-deoxy-2'Fluoro
  misc_feature (18)..(18): 2'-deoxy-2'Fluoro
  misc_feature (1)..(19): ribonucleotide unmodified or modified as described for this sequence
aagcugcaccagcugcacatt

SEQ ID NO: 1926 - DNA, 21 bp, Artificial Sequence
  Description of Artificial Sequence: Target Sequence/siNA antisense region (stab05)
  misc_feature (1)..(1): 2'-deoxy-2'Fluoro
  misc_feature (3)..(3): 2'-deoxy-2'Fluoro
  misc_feature (5)..(5): 2'-deoxy-2'Fluoro
  misc_feature (8)..(9): 2'-deoxy-2'Fluoro
  misc_feature (12)..(12): 2'-deoxy-2'Fluoro
  misc_feature (14)..(14): 2'-deoxy-2'Fluoro
  misc_feature (17)..(19): 2'-deoxy-2'Fluoro
  misc_feature (20)..(20): Phosphorothioate or Phosphorodithioate 3'-Internucleotide Linkage (optionally present)
  misc_feature (1)..(19): ribonucleotide unmodified or modified as described for this sequence
ugugcagcuggugcagcuutt

SEQ ID NO: 1927 - DNA, 21 bp, Artificial Sequence
  Description of Artificial Sequence: Target Sequence/siNA sense region (stab07)
  misc_feature (1)..(1): 5'-3 attached terminal deoxyabasic moiety, inverted abasic, inverted nucleotide or other terminal cap that is optionally present
  misc_feature (21)..(21): 3'-3 attached terminal deoxyabasic moiety, inverted abasic, inverted nucleotide or other terminal cap that is optionally present
  misc_feature (4)..(5): 2'-deoxy-2'Fluoro
  misc_feature (7)..(7): 2'-deoxy-2'Fluoro
  misc_feature (9)..(10): 2'-deoxy-2'Fluoro
  misc_feature (13)..(14): 2'-deoxy-2'Fluoro
  misc_feature (16)..(16): 2'-deoxy-2'Fluoro
  misc_feature (18)..(18): 2'-deoxy-2'Fluoro
  misc_feature (1)..(19): ribonucleotide unmodified or modified as described for this sequence
aagcugcaccagcugcacatt

SEQ ID NO: 1928 - DNA, 21 bp, Artificial Sequence
  Description of Artificial Sequence: Target Sequence/siNA antisense region (stab08)
  misc_feature (1)..(1): 2'-deoxy-2'Fluoro
  misc_feature (2)..(2): 2'-O-methyl
  misc_feature (3)..(3): 2'-deoxy-2'Fluoro
  misc_feature (4)..(4): 2'-O-methyl
  misc_feature (5)..(5): 2'-deoxy-2'Fluoro
  misc_feature (6)..(7): 2'-O-methyl
  misc_feature (8)..(9): 2'-deoxy-2'Fluoro
  misc_feature (10)..(11): 2'-O-methyl
  misc_feature (12)..(12): 2'-deoxy-2'Fluoro
  misc_feature (13)..(13): 2'-O-methyl
  misc_feature (14)..(14): 2'-deoxy-2'Fluoro
  misc_feature (15)..(16): 2'-O-methyl
  misc_feature (17)..(19): 2'-deoxy-2'Fluoro
  misc_feature (20)..(20): Phosphorothioate or Phosphorodithioate 3'-Internucleotide Linkage (optionally present)
  misc_feature (1)..(19): ribonucleotide unmodified or modified as described for this sequence
ugugcagcuggugcagcuutt

SEQ ID NO: 1929 - DNA, 21 bp, Artificial Sequence
  Description of Artificial Sequence: Target Sequence/siNA sense region (stab09)
  misc_feature (1)..(1): 5'-3 attached terminal deoxyabasic moiety, inverted abasic, inverted nucleotide or other terminal cap that is optionally present
  misc_feature (21)..(21): 3'-3 attached terminal deoxyabasic moiety, inverted abasic, inverted nucleotide or other terminal cap that is optionally present
  misc_feature (1)..(19): ribonucleotide unmodified or modified as described for this sequence
aagcugcaccagcugcacatt

SEQ ID NO: 1930 - DNA, 21 bp, Artificial Sequence
  Description of Artificial Sequence: Target Sequence/siNA antisense region (stab10)
  misc_feature (20)..(20): Phosphorothioate or Phosphorodithioate 3'-Internucleotide Linkage (optionally present)
  misc_feature (1)..(19): ribonucleotide unmodified or modified as described for this sequence
ugugcagcuggugcagcuutt

SEQ ID NO: 1931 - DNA, 21 bp, Artificial Sequence
  Description of Artificial Sequence: Target Sequence/siNA antisense region (stab19)
  misc_feature (21)..(21): 3'-3 attached terminal deoxyabasic moiety, inverted abasic, inverted nucleotide or other terminal cap that is optionally present
  misc_feature (1)..(1): 2'-deoxy-2'Fluoro
  misc_feature (2)..(2): 2'-O-methyl
  misc_feature (3)..(3): 2'-deoxy-2'Fluoro
  misc_feature (4)..(4): 2'-O-methyl
  misc_feature (5)..(5): 2'-deoxy-2'Fluoro
  misc_feature (6)..(7): 2'-O-methyl
  misc_feature (8)..(9): 2'-deoxy-2'Fluoro
  misc_feature (10)..(11): 2'-O-methyl
  misc_feature (12)..(12): 2'-deoxy-2'Fluoro
  misc_feature (13)..(13): 2'-O-methyl
  misc_feature (14)..(14): 2'-deoxy-2'Fluoro
  misc_feature (15)..(16): 2'-O-methyl
  misc_feature (17)..(19): 2'-deoxy-2'Fluoro
  misc_feature (1)..(19): ribonucleotide unmodified or modified as described for this sequence
ugugcagcuggugcagcuutt

SEQ ID NO: 1932 - DNA, 21 bp, Artificial Sequence
  Description of Artificial Sequence: Target Sequence/siNA antisense region (stab22)
  misc_feature (21)..(21): 3'-3 attached terminal deoxyabasic moiety, inverted abasic, inverted nucleotide or other terminal cap that is optionally present
  misc_feature (20)..(20): Phosphorothioate or Phosphorodithioate 3'-Internucleotide Linkage (optionally present)
  misc_feature (1)..(19): ribonucleotide unmodified or modified as described for this sequence
ugugcagcuggugcagcuutt

SEQ ID NO: 1933 - DNA, 21 bp, Artificial Sequence
  Description of Artificial Sequence: Target Sequence/siNA antisense region (stab25)
  misc_feature (4)..(4): 2'-O-methyl
  misc_feature (5)..(5): 2'-deoxy-2'Fluoro
  misc_feature (6)..(7): 2'-O-methyl
  misc_feature (8)..(9): 2'-deoxy-2'Fluoro
  misc_feature (10)..(11): 2'-O-methyl
  misc_feature (12)..(12): 2'-deoxy-2'Fluoro
  misc_feature (13)..(13): 2'-O-methyl
  misc_feature (14)..(14): 2'-deoxy-2'Fluoro
  misc_feature (15)..(16): 2'-O-methyl
  misc_feature (17)..(19): 2'-deoxy-2'Fluoro
  misc_feature (20)..(20): Phosphorothioate or Phosphorodithioate 3'-Internucleotide Linkage (optionally present)
  misc_feature (1)..(19): ribonucleotide unmodified or modified as described for this sequence
ugugcagcuggugcagcuutt

SEQ ID NO: 1934 - RNA, 21 nt, Artificial Sequence
  Description of Artificial Sequence: Target Sequence/siNA antisense region (stab35)
  misc_feature (4)..(4): 2'-O-methyl
  misc_feature (5)..(5): 2'-deoxy-2'Fluoro
  misc_feature (6)..(7): 2'-O-methyl
  misc_feature (8)..(9): 2'-deoxy-2'Fluoro
  misc_feature (10)..(11): 2'-O-methyl
  misc_feature (12)..(12): 2'-deoxy-2'Fluoro
  misc_feature (13)..(13): 2'-O-methyl
  misc_feature (14)..(14): 2'-deoxy-2'Fluoro
  misc_feature (15)..(16): 2'-O-methyl
  misc_feature (17)..(19): 2'-deoxy-2'Fluoro
  misc_feature (20)..(21): 2'-O-methyl
ugugcagcuggugcagcuuuu

SEQ ID NO: 1935 - RNA, 21 nt, Artificial Sequence
  Description of Artificial Sequence: Target Sequence/siNA antisense region (stab36)
  misc_feature (4)..(4): 2'-O-methyl
  misc_feature (5)..(5): 2'-deoxy-2'Fluoro
  misc_feature (6)..(7): 2'-O-methyl
  misc_feature (8)..(9): 2'-deoxy-2'Fluoro
  misc_feature (10)..(11): 2'-O-methyl
  misc_feature (12)..(12): 2'-deoxy-2'Fluoro
  misc_feature (13)..(13): 2'-O-methyl
  misc_feature (14)..(14): 2'-deoxy-2'Fluoro
  misc_feature (15)..(16): 2'-O-methyl
  misc_feature (17)..(19): 2'-deoxy-2'Fluoro
  misc_feature (20)..(21): 2'-O-methyl
ugugcagcuggugcagcuuau

SEQ ID NO: 1936 - RNA, 19 nt, Artificial Sequence
  Description of Artificial Sequence: Target Sequence/siNA sense region
accauggggaagcacacag

SEQ ID NO: 1937 - RNA, 19 nt, Artificial Sequence
  Description of Artificial Sequence: Target Sequence/siNA antisense region
cugugugcuuccccauggu

SEQ ID NO: 1938 - DNA, 21 bp, Artificial Sequence
  Description of Artificial Sequence: Target Sequence/siNA sense region (stab00)
  misc_feature (1)..(19): ribonucleotide unmodified or modified as described for this sequence
accauggggaagcacacagtt

SEQ ID NO: 1939 - DNA, 21 bp, Artificial Sequence
  Description of Artificial Sequence: Target Sequence/siNA antisense region (stab00as)
  misc_feature (1)..(19): ribonucleotide unmodified or modified as described for this sequence
cugugugcuuccccauggutt

SEQ ID NO: 1940 - DNA, 21 bp, Artificial Sequence
  Description of Artificial Sequence: Target Sequence/siNA sense region (stab04)
  misc_feature (1)..(1): 5'-3 attached terminal deoxyabasic moiety, inverted abasic, inverted nucleotide or other terminal cap that is optionally present
  misc_feature (21)..(21): 3'-3 attached terminal deoxyabasic moiety, inverted abasic, inverted nucleotide or other terminal cap that is optionally present
  misc_feature (2)..(3): 2'-deoxy-2'Fluoro
  misc_feature (5)..(5): 2'-deoxy-2'Fluoro
  misc_feature (13)..(13): 2'-deoxy-2'Fluoro
  misc_feature (15)..(15): 2'-deoxy-2'Fluoro
  misc_feature (17)..(17): 2'-deoxy-2'Fluoro
  misc_feature (1)..(19): ribonucleotide unmodified or modified as described for this sequence
accauggggaagcacacagtt

SEQ ID NO: 1941 - DNA, 21 bp, Artificial Sequence
  Description of Artificial Sequence: Target Sequence/siNA antisense region (stab05)
  misc_feature (1)..(2): 2'-deoxy-2'Fluoro
  misc_feature (4)..(4): 2'-deoxy-2'Fluoro
  misc_feature (6)..(6): 2'-deoxy-2'Fluoro
  misc_feature (8)..(14): 2'-deoxy-2'Fluoro
  misc_feature (16)..(16): 2'-deoxy-2'Fluoro
  misc_feature (19)..(19): 2'-deoxy-2'Fluoro
  misc_feature (20)..(20): Phosphorothioate or Phosphorodithioate 3'-Internucleotide Linkage (optionally present)
  misc_feature (1)..(19): ribonucleotide unmodified or modified as described for this sequence
cugugugcuuccccauggutt

SEQ ID NO: 1942 - DNA, 21 bp, Artificial Sequence
  Description of Artificial Sequence: Target Sequence/siNA sense region (stab07)
  misc_feature (1)..(1): 5'-3 attached terminal deoxyabasic moiety, inverted abasic, inverted nucleotide or other terminal cap that is optionally present
  misc_feature (21)..(21): 3'-3 attached terminal deoxyabasic moiety, inverted abasic, inverted nucleotide or other terminal cap that is optionally present
  misc_feature (2)..(3): 2'-deoxy-2'Fluoro
  misc_feature (5)..(5): 2'-deoxy-2'Fluoro
  misc_feature (13)..(13): 2'-deoxy-2'Fluoro
  misc_feature (15)..(15): 2'-deoxy-2'Fluoro
  misc_feature (17)..(17): 2'-deoxy-2'Fluoro
accauggggaagcacacagtt

SEQ ID NO: 1943 - DNA, 21 bp, Artificial Sequence
  Description of Artificial Sequence: Target Sequence/siNA antisense region (stab08)
  misc_feature (1)..(2): 2'-deoxy-2'Fluoro
  misc_feature (3)..(3): 2'-O-methyl
  misc_feature (4)..(4): 2'-deoxy-2'Fluoro
  misc_feature (5)..(5): 2'-O-methyl
  misc_feature (6)..(6): 2'-deoxy-2'Fluoro
  misc_feature (7)..(7): 2'-O-methyl
  misc_feature (8)..(14): 2'-deoxy-2'Fluoro
  misc_feature (15)..(15): 2'-O-methyl
  misc_feature (16)..(16): 2'-deoxy-2'Fluoro
  misc_feature (17)..(18): 2'-O-methyl
  misc_feature (19)..(19): 2'-deoxy-2'Fluoro
  misc_feature (20)..(20): Phosphorothioate or Phosphorodithioate 3'-Internucleotide Linkage (optionally present)
cugugugcuuccccauggutt

SEQ ID NO: 1944 - DNA, 21 bp, Artificial Sequence
  Description of Artificial Sequence: Target Sequence/siNA sense region (stab09)
  misc_feature (1)..(1): 5'-3 attached terminal deoxyabasic moiety, inverted abasic, inverted nucleotide or other terminal cap that is optionally present
  misc_feature (21)..(21): 3'-3 attached terminal deoxyabasic moiety, inverted abasic, inverted nucleotide or other terminal cap that is optionally present
  misc_feature (1)..(19): ribonucleotide unmodified or modified as described for this sequence
accauggggaagcacacagtt

SEQ ID NO: 1945 - DNA, 21 bp, Artificial Sequence
  Description of Artificial Sequence: Target Sequence/siNA antisense region (stab10)
  misc_feature (20)..(20): Phosphorothioate or Phosphorodithioate 3'-Internucleotide Linkage (optionally present)
  misc_feature (1)..(19): ribonucleotide unmodified or modified as described for this sequence
cugugugcuuccccauggutt

SEQ ID NO: 1946 - DNA, 21 bp, Artificial Sequence
  Description of Artificial Sequence: Target Sequence/siNA antisense region (stab19)
  misc_feature (21)..(21): 3'-3 attached terminal deoxyabasic moiety, inverted abasic, inverted nucleotide or other terminal cap that is optionally present
  misc_feature (1)..(2): 2'-deoxy-2'Fluoro
  misc_feature (3)..(3): 2'-O-methyl
  misc_feature (4)..(4): 2'-deoxy-2'Fluoro
  misc_feature (5)..(5): 2'-O-methyl
  misc_feature (6)..(6): 2'-deoxy-2'Fluoro
  misc_feature (7)..(7): 2'-O-methyl
  misc_feature (8)..(14): 2'-deoxy-2'Fluoro
  misc_feature (15)..(15): 2'-O-methyl
  misc_feature (16)..(16): 2'-deoxy-2'Fluoro
  misc_feature (17)..(18): 2'-O-methyl
  misc_feature (19)..(19): 2'-deoxy-2'Fluoro
  misc_feature (1)..(19): ribonucleotide unmodified or modified as described for this sequence
cugugugcuuccccauggutt

SEQ ID NO: 1947 - DNA, 21 bp, Artificial Sequence
  Description of Artificial Sequence: Target Sequence/siNA antisense region (stab22)
  misc_feature (21)..(21): 3'-3 attached terminal deoxyabasic moiety, inverted abasic, inverted nucleotide or other terminal cap that is optionally present
  misc_feature (20)..(20): Phosphorothioate or Phosphorodithioate 3'-Internucleotide Linkage (optionally present)
  misc_feature (1)..(19): ribonucleotide unmodified or modified as described for this sequence
cugugugcuuccccauggutt

SEQ ID NO: 1948 - DNA, 21 bp, Artificial Sequence
  Description of Artificial Sequence: Target Sequence/siNA antisense region (stab25)
  misc_feature (4)..(4): 2'-deoxy-2'Fluoro
  misc_feature (5)..(5): 2'-O-methyl
  misc_feature (6)..(6): 2'-deoxy-2'Fluoro
  misc_feature (7)..(7): 2'-O-methyl
  misc_feature (8)..(14): 2'-deoxy-2'Fluoro
  misc_feature (15)..(15): 2'-O-methyl
  misc_feature (16)..(16): 2'-deoxy-2'Fluoro
  misc_feature (17)..(18): 2'-O-methyl
  misc_feature (19)..(19): 2'-deoxy-2'Fluoro
  misc_feature (20)..(20): Phosphorothioate or Phosphorodithioate 3'-Internucleotide Linkage (optionally present)
  misc_feature (1)..(19): ribonucleotide unmodified or modified as described for this sequence
cugugugcuuccccauggutt

SEQ ID NO: 1949 - RNA, 21 nt, Artificial Sequence
  Description of Artificial Sequence: Target Sequence/siNA antisense region (stab35)
  misc_feature (4)..(4): 2'-deoxy-2'Fluoro
  misc_feature (5)..(5): 2'-O-methyl
  misc_feature (6)..(6): 2'-deoxy-2'Fluoro
  misc_feature (7)..(7): 2'-O-methyl
  misc_feature (8)..(14): 2'-deoxy-2'Fluoro
  misc_feature (15)..(15): 2'-O-methyl
  misc_feature (16)..(16): 2'-deoxy-2'Fluoro
  misc_feature (17)..(18): 2'-O-methyl
  misc_feature (19)..(19): 2'-deoxy-2'Fluoro
  misc_feature (20)..(21): 2'-O-methyl
cugugugcuuccccaugguuu

SEQ ID NO: 1950 - RNA, 21 nt, Artificial Sequence
  Description of Artificial Sequence: Target Sequence/siNA antisense region (stab36)
  misc_feature (4)..(4): 2'-deoxy-2'Fluoro
  misc_feature (5)..(5): 2'-O-methyl
  misc_feature (6)..(6): 2'-deoxy-2'Fluoro
  misc_feature (7)..(7): 2'-O-methyl
  misc_feature (8)..(14): 2'-deoxy-2'Fluoro
  misc_feature (15)..(15): 2'-O-methyl
  misc_feature (16)..(16): 2'-deoxy-2'Fluoro
  misc_feature (17)..(18): 2'-O-methyl
  misc_feature (19)..(19): 2'-deoxy-2'Fluoro
  misc_feature (20)..(21): 2'-O-methyl
cugugugcuuccccauggugu

SEQ ID NO: 1951 - RNA, 19 nt, Artificial Sequence
  Description of Artificial Sequence: Target Sequence/siNA sense region
ggcgggcaccucacugcca

SEQ ID NO: 1952 - RNA, 19 nt, Artificial Sequence
  Description of Artificial Sequence: Target Sequence/siNA antisense region
uggcagugaggugcccgcc

SEQ ID NO: 1953 - DNA, 21 bp, Artificial Sequence
  Description of Artificial Sequence: Target Sequence/siNA sense region (stab00)
  misc_feature (1)..(19): ribonucleotide unmodified or modified as described for this sequence
ggcgggcaccucacugccatt

SEQ ID NO: 1954 - DNA, 21 bp, Artificial Sequence
  Description of Artificial Sequence: Target Sequence/siNA antisense region (stab00as)
  misc_feature (1)..(19): ribonucleotide unmodified or modified as described for this sequence
uggcagugaggugcccgcctt

SEQ ID NO: 1955 - DNA, 21 bp, Artificial Sequence
  Description of Artificial Sequence: Target Sequence/siNA sense region (stab04)
  misc_feature (1)..(1): 5'-3 attached terminal deoxyabasic moiety, inverted abasic, inverted nucleotide or other terminal cap that is optionally present
  misc_feature (21)..(21): 3'-3 attached terminal deoxyabasic moiety, inverted abasic, inverted nucleotide or other terminal cap that is optionally present
  misc_feature (3)..(3): 2'-deoxy-2'Fluoro
  misc_feature (7)..(7): 2'-deoxy-2'Fluoro
  misc_feature (9)..(12): 2'-deoxy-2'Fluoro
  misc_feature (14)..(15): 2'-deoxy-2'Fluoro
  misc_feature (17)..(18): 2'-deoxy-2'Fluoro
  misc_feature (1)..(19): ribonucleotide unmodified or modified as described for this sequence
ggcgggcaccucacugccatt

SEQ ID NO: 1956 - DNA, 21 bp, Artificial Sequence
  Description of Artificial Sequence: Target Sequence/siNA antisense region (stab05)
  misc_feature (1)..(1): 2'-deoxy-2'Fluoro
  misc_feature (4)..(4): 2'-deoxy-2'Fluoro
  misc_feature (7)..(7): 2'-deoxy-2'Fluoro
  misc_feature (12)..(12): 2'-deoxy-2'Fluoro
  misc_feature (14)..(16): 2'-deoxy-2'Fluoro
  misc_feature (18)..(19): 2'-deoxy-2'Fluoro
  misc_feature (20)..(20): Phosphorothioate or Phosphorodithioate 3'-Internucleotide Linkage (optionally present)
  misc_feature (1)..(19): ribonucleotide unmodified or modified as described for this sequence
uggcagugaggugcccgcctt

SEQ ID NO: 1957 - DNA, 21 bp, Artificial Sequence
  Description of Artificial Sequence: Target Sequence/siNA sense region (stab07)
  misc_feature (1)..(1): 5'-3 attached terminal deoxyabasic moiety, inverted abasic, inverted nucleotide or other terminal cap that is optionally present
  misc_feature (21)..(21): 3'-3 attached terminal deoxyabasic moiety, inverted abasic, inverted nucleotide or other terminal cap that is optionally present
  misc_feature (3)..(3): 2'-deoxy-2'Fluoro
  misc_feature (7)..(7): 2'-deoxy-2'Fluoro
  misc_feature (9)..(12): 2'-deoxy-2'Fluoro
  misc_feature (14)..(15): 2'-deoxy-2'Fluoro
  misc_feature (17)..(18): 2'-deoxy-2'Fluoro
  misc_feature (1)..(19): ribonucleotide unmodified or modified as described for this sequence
ggcgggcaccucacugccatt

SEQ ID NO: 1958 - DNA, 21 bp, Artificial Sequence
  Description of Artificial Sequence: Target Sequence/siNA antisense region (stab08)
  misc_feature (1)..(1): 2'-deoxy-2'Fluoro
  misc_feature (2)..(3): 2'-O-methyl
  misc_feature (4)..(4): 2'-deoxy-2'Fluoro
  misc_feature (5)..(6): 2'-O-methyl
  misc_feature (7)..(7): 2'-deoxy-2'Fluoro
  misc_feature (8)..(11): 2'-O-methyl
  misc_feature (12)..(12): 2'-deoxy-2'Fluoro
  misc_feature (13)..(13): 2'-O-methyl
  misc_feature (14)..(16): 2'-deoxy-2'Fluoro
  misc_feature (17)..(17): 2'-O-methyl
  misc_feature (18)..(19): 2'-deoxy-2'Fluoro
  misc_feature (20)..(20): Phosphorothioate or Phosphorodithioate 3'-Internucleotide Linkage (optionally present)
  misc_feature (1)..(19): ribonucleotide unmodified or modified as described for this sequence
uggcagugaggugcccgcctt

SEQ ID NO: 1959 - DNA, 21 bp, Artificial Sequence
  Description of Artificial Sequence: Target Sequence/siNA sense region (stab09)
  misc_feature (1)..(1): 5'-3 attached terminal deoxyabasic moiety, inverted abasic, inverted nucleotide or other terminal cap that is optionally present
  misc_feature (21)..(21): 3'-3 attached terminal deoxyabasic moiety, inverted abasic, inverted nucleotide or other terminal cap that is optionally present
  misc_feature (1)..(19): ribonucleotide unmodified or modified as described for this sequence
ggcgggcaccucacugccatt

SEQ ID NO: 1960 - DNA, 21 bp, Artificial Sequence
  Description of Artificial Sequence: Target Sequence/siNA antisense region (stab10)
  misc_feature (20)..(20): Phosphorothioate or Phosphorodithioate 3'-Internucleotide Linkage (optionally present)
  misc_feature (1)..(19): ribonucleotide unmodified or modified as described for this sequence
uggcagugaggugcccgcctt

SEQ ID NO: 1961 - DNA, 21 bp, Artificial Sequence
  Description of Artificial Sequence: Target Sequence/siNA antisense region (stab19)
  misc_feature (21)..(21): 3'-3 attached terminal deoxyabasic moiety, inverted abasic, inverted nucleotide or other terminal cap that is optionally present
  misc_feature (1)..(1): 2'-deoxy-2'Fluoro
  misc_feature (2)..(3): 2'-O-methyl
  misc_feature (4)..(4): 2'-deoxy-2'Fluoro
  misc_feature (5)..(6): 2'-O-methyl
  misc_feature (7)..(7): 2'-deoxy-2'Fluoro
  misc_feature (8)..(11): 2'-O-methyl
  misc_feature (12)..(12): 2'-deoxy-2'Fluoro
  misc_feature (13)..(13): 2'-O-methyl
  misc_feature (14)..(16): 2'-deoxy-2'Fluoro
  misc_feature (17)..(17): 2'-O-methyl
  misc_feature (18)..(19): 2'-deoxy-2'Fluoro
  misc_feature (1)..(19): ribonucleotide unmodified or modified as described for this sequence
uggcagugaggugcccgcctt

SEQ ID NO: 1962 - DNA, 21 bp, Artificial Sequence
  Description of Artificial Sequence: Target Sequence/siNA antisense region (stab22)
  misc_feature (21)..(21): 3'-3 attached terminal deoxyabasic moiety, inverted abasic, inverted nucleotide or other terminal cap that is optionally present
  misc_feature (20)..(20): Phosphorothioate or Phosphorodithioate 3'-Internucleotide Linkage (optionally present)
  misc_feature (1)..(19): ribonucleotide unmodified or modified as described for this sequence
uggcagugaggugcccgcctt

SEQ ID NO: 1963 - DNA, 21 bp, Artificial Sequence
  Description of Artificial Sequence: Target Sequence/siNA antisense region (stab25)
  misc_feature (4)..(4): 2'-deoxy-2'Fluoro
  misc_feature (5)..(6): 2'-O-methyl
  misc_feature (7)..(7): 2'-deoxy-2'Fluoro
  misc_feature (8)..(11): 2'-O-methyl
  misc_feature (12)..(12): 2'-deoxy-2'Fluoro
  misc_feature (13)..(13): 2'-O-methyl
  misc_feature (14)..(16): 2'-deoxy-2'Fluoro
  misc_feature (17)..(17): 2'-O-methyl
  misc_feature (18)..(19): 2'-deoxy-2'Fluoro
  misc_feature (20)..(20): Phosphorothioate or Phosphorodithioate 3'-Internucleotide Linkage (optionally present)
  misc_feature (1)..(19): ribonucleotide unmodified or modified as described for this sequence
uggcagugaggugcccgcctt

SEQ ID NO: 1964 - RNA, 21 nt, Artificial Sequence
  Description of Artificial Sequence: Target Sequence/siNA antisense region (stab35)
  misc_feature (4)..(4): 2'-deoxy-2'Fluoro
  misc_feature (5)..(6): 2'-O-methyl
  misc_feature (7)..(7): 2'-deoxy-2'Fluoro
  misc_feature (8)..(11): 2'-O-methyl
  misc_feature (12)..(12): 2'-deoxy-2'Fluoro
  misc_feature (13)..(13): 2'-O-methyl
  misc_feature (14)..(16): 2'-deoxy-2'Fluoro
  misc_feature (17)..(17): 2'-O-methyl
  misc_feature (18)..(19): 2'-deoxy-2'Fluoro
  misc_feature (20)..(21): 2'-O-methyl
uggcagugaggugcccgccuu

SEQ ID NO: 1965 - RNA, 21 nt, Artificial Sequence
  Description of Artificial Sequence: Target Sequence/siNA antisense region (stab36)
  misc_feature (4)..(4): 2'-deoxy-2'Fluoro
  misc_feature (5)..(6): 2'-O-methyl
  misc_feature (7)..(7): 2'-deoxy-2'Fluoro
  misc_feature (8)..(11): 2'-O-methyl
  misc_feature (12)..(12): 2'-deoxy-2'Fluoro
  misc_feature (13)..(13): 2'-O-methyl
  misc_feature (14)..(16): 2'-deoxy-2'Fluoro
  misc_feature (17)..(17): 2'-O-methyl
  misc_feature (18)..(19): 2'-deoxy-2'Fluoro
  misc_feature (20)..(21): 2'-O-methyl
uggcagugaggugcccgccug

SEQ ID NO: 1966 - RNA, 19 nt, Artificial Sequence
  Description of Artificial Sequence: Target Sequence/siNA sense region
accaaccuggcgcugagug

SEQ ID NO: 1967 - RNA, 19 nt, Artificial Sequence
  Description of Artificial Sequence: Target Sequence/siNA antisense region
cacucagcgccagguuggu

SEQ ID NO: 1968 - DNA, 21 bp, Artificial Sequence
  Description of Artificial Sequence: Target Sequence/siNA sense region (stab00)
  misc_feature (1)..(19): ribonucleotide unmodified or modified as described for this sequence
accaaccuggcgcugagugtt

SEQ ID NO: 1969 - DNA, 21 bp, Artificial Sequence
  Description of Artificial Sequence: Target Sequence/siNA antisense region (stab00as)
  misc_feature (1)..(19): ribonucleotide unmodified or modified as described for this sequence
cacucagcgccagguuggutt

SEQ ID NO: 1970 - DNA, 21 bp, Artificial Sequence
  Description of Artificial Sequence: Target Sequence/siNA sense region (stab04)
  misc_feature (1)..(1): 5'-3 attached terminal deoxyabasic moiety, inverted abasic, inverted nucleotide or other terminal cap that is optionally present
  misc_feature (21)..(21): 3'-3 attached terminal deoxyabasic moiety, inverted abasic, inverted nucleotide or other terminal cap that is optionally present
  misc_feature (2)..(3): 2'-deoxy-2'Fluoro
  misc_feature (6)..(8): 2'-deoxy-2'Fluoro
  misc_feature (11)..(11): 2'-deoxy-2'Fluoro
  misc_feature (13)..(14): 2'-deoxy-2'Fluoro
  misc_feature (18)..(18): 2'-deoxy-2'Fluoro
  misc_feature (1)..(19): ribonucleotide unmodified or modified as described for this sequence
accaaccuggcgcugagugtt

SEQ ID NO: 1971 - DNA, 21 bp, Artificial Sequence
  Description of Artificial Sequence: Target Sequence/siNA antisense region (stab05)
  misc_feature (1)..(1): 2'-deoxy-2'Fluoro
  misc_feature (3)..(5): 2'-deoxy-2'Fluoro
  misc_feature (8)..(8): 2'-deoxy-2'Fluoro
  misc_feature (10)..(11): 2'-deoxy-2'Fluoro
  misc_feature (15)..(16): 2'-deoxy-2'Fluoro
  misc_feature (19)..(19): 2'-deoxy-2'Fluoro
  misc_feature (20)..(20): Phosphorothioate or Phosphorodithioate 3'-Internucleotide Linkage (optionally present)
  misc_feature (1)..(19): ribonucleotide unmodified or modified as described for this sequence
cacucagcgccagguuggutt

SEQ ID NO: 1972 - DNA, 21 bp, Artificial Sequence
  Description of Artificial Sequence: Target Sequence/siNA sense region (stab07)
  misc_feature (1)..(1): 5'-3 attached terminal deoxyabasic moiety, inverted abasic, inverted nucleotide or other terminal cap that is optionally present
  misc_feature (21)..(21): 3'-3 attached terminal deoxyabasic moiety, inverted abasic, inverted nucleotide or other terminal cap that is optionally present
  misc_feature (2)..(3): 2'-deoxy-2'Fluoro
  misc_feature (6)..(8): 2'-deoxy-2'Fluoro
  misc_feature (11)..(11): 2'-deoxy-2'Fluoro
  misc_feature (13)..(14): 2'-deoxy-2'Fluoro
  misc_feature (18)..(18): 2'-deoxy-2'Fluoro
  misc_feature (1)..(19): ribonucleotide unmodified or modified as described for this sequence
accaaccuggcgcugagugtt

SEQ ID NO: 1973 - DNA, 21 bp, Artificial Sequence
  Description of Artificial Sequence: Target Sequence/siNA antisense region (stab08)
  misc_feature (1)..(1): 2'-deoxy-2'Fluoro
  misc_feature (2)..(2): 2'-O-methyl
  misc_feature (3)..(5): 2'-deoxy-2'Fluoro
  misc_feature (6)..(7): 2'-O-methyl
  misc_feature (8)..(8): 2'-deoxy-2'Fluoro
  misc_feature (9)..(9): 2'-O-methyl
  misc_feature (10)..(11): 2'-deoxy-2'Fluoro
  misc_feature (12)..(14): 2'-O-methyl
  misc_feature (15)..(16): 2'-deoxy-2'Fluoro
  misc_feature (17)..(18): 2'-O-methyl
  misc_feature (19)..(19): 2'-deoxy-2'Fluoro
  misc_feature (20)..(20): Phosphorothioate or Phosphorodithioate 3'-Internucleotide Linkage (optionally present)
  misc_feature (1)..(19): ribonucleotide unmodified or modified as described for this sequence
cacucagcgccagguuggutt

SEQ ID NO: 1974 - DNA, 21 bp, Artificial Sequence
  Description of Artificial Sequence: Target Sequence/siNA sense region (stab09)
  misc_feature (1)..(1): 5'-3 attached terminal deoxyabasic moiety, inverted abasic, inverted nucleotide or other terminal cap that is optionally present
  misc_feature (21)..(21): 3'-3 attached terminal deoxyabasic moiety, inverted abasic, inverted nucleotide or other terminal cap that is optionally present
  misc_feature (1)..(19): ribonucleotide unmodified or modified as described for this sequence
accaaccuggcgcugagugtt

SEQ ID NO: 1975 - DNA, 21 bp, Artificial Sequence
  Description of Artificial Sequence: Target Sequence/siNA antisense region (stab10)
  misc_feature (20)..(20): Phosphorothioate or Phosphorodithioate 3'-Internucleotide Linkage (optionally present)
  misc_feature (1)..(19): ribonucleotide unmodified or modified as described for this sequence
cacucagcgccagguuggutt

SEQ ID NO: 1976 - DNA, 21 bp, Artificial Sequence
  Description of Artificial Sequence: Target Sequence/siNA antisense region (stab19)
  misc_feature (21)..(21): 3'-3 attached terminal deoxyabasic moiety, inverted abasic, inverted nucleotide or other terminal cap that is optionally present
  misc_feature (1)..(1): 2'-deoxy-2'Fluoro
  misc_feature (2)..(2): 2'-O-methyl
  misc_feature (3)..(5): 2'-deoxy-2'Fluoro
  misc_feature (6)..(7): 2'-O-methyl
  misc_feature (8)..(8): 2'-deoxy-2'Fluoro
  misc_feature (9)..(9): 2'-O-methyl
  misc_feature (10)..(11): 2'-deoxy-2'Fluoro
  misc_feature (12)..(14): 2'-O-methyl
  misc_feature (15)..(16): 2'-deoxy-2'Fluoro
  misc_feature (17)..(18): 2'-O-methyl
  misc_feature (19)..(19): 2'-deoxy-2'Fluoro
  misc_feature (1)..(19): ribonucleotide unmodified or modified as described for this sequence
cacucagcgccagguuggutt

SEQ ID NO: 1977 - DNA, 21 bp, Artificial Sequence
  Description of Artificial Sequence: Target Sequence/siNA antisense region (stab22)
  misc_feature (21)..(21): 3'-3 attached terminal deoxyabasic moiety, inverted abasic, inverted nucleotide or other terminal cap that is optionally present
  misc_feature (20)..(20): Phosphorothioate or Phosphorodithioate 3'-Internucleotide Linkage (optionally present)
  misc_feature (1)..(19): ribonucleotide unmodified or modified as described for this sequence
cacucagcgccagguuggutt

SEQ ID NO: 1978 - DNA, 21 bp, Artificial Sequence
  Description of Artificial Sequence: Target Sequence/siNA antisense region (stab25)
  misc_feature (4)..(5): 2'-deoxy-2'Fluoro
  misc_feature (6)..(7): 2'-O-methyl
  misc_feature (8)..(8): 2'-deoxy-2'Fluoro
  misc_feature (9)..(9): 2'-O-methyl
  misc_feature (10)..(11): 2'-deoxy-2'Fluoro
  misc_feature (12)..(14): 2'-O-methyl
  misc_feature (15)..(16): 2'-deoxy-2'Fluoro
  misc_feature (17)..(18): 2'-O-methyl
  misc_feature (19)..(19): 2'-deoxy-2'Fluoro
  misc_feature (20)..(20): Phosphorothioate or Phosphorodithioate 3'-Internucleotide Linkage (optionally present)
  misc_feature (1)..(19): ribonucleotide unmodified or modified as described for this sequence
cacucagcgccagguuggutt

SEQ ID NO: 1979 - RNA, 21 nt, Artificial Sequence
  Description of Artificial Sequence: Target Sequence/siNA antisense region (stab35)
  misc_feature (4)..(5): 2'-deoxy-2'Fluoro
  misc_feature (6)..(7): 2'-O-methyl
  misc_feature (8)..(8): 2'-deoxy-2'Fluoro
  misc_feature (9)..(9): 2'-O-methyl
  misc_feature (10)..(11): 2'-deoxy-2'Fluoro
  misc_feature (12)..(14): 2'-O-methyl
  misc_feature (15)..(16): 2'-deoxy-2'Fluoro
  misc_feature (17)..(18): 2'-O-methyl
  misc_feature (19)..(19): 2'-deoxy-2'Fluoro
  misc_feature (20)..(21): 2'-O-methyl
cacucagcgccagguugguuu

SEQ ID NO: 1980 - RNA, 21 nt, Artificial Sequence
  Description of Artificial Sequence: Target Sequence/siNA antisense region (stab36)
  misc_feature (4)..(5): 2'-deoxy-2'Fluoro
  misc_feature (6)..(7): 2'-O-methyl
  misc_feature (8)..(8): 2'-deoxy-2'Fluoro
  misc_feature (9)..(9): 2'-O-methyl
  misc_feature (10)..(11): 2'-deoxy-2'Fluoro
  misc_feature (12)..(14): 2'-O-methyl
  misc_feature (15)..(16): 2'-deoxy-2'Fluoro
  misc_feature (17)..(18): 2'-O-methyl
  misc_feature (19)..(19): 2'-deoxy-2'Fluoro
  misc_feature (20)..(21): 2'-O-methyl
cacucagcgccagguuggugg

SEQ ID NO: 1981 - RNA, 19 nt, Artificial Sequence
  Description of Artificial Sequence: Target Sequence/siNA sense region
gcccugaaccuggcagagu

SEQ ID NO: 1982 - RNA, 19 nt, Artificial Sequence
  Description of Artificial Sequence: Target Sequence/siNA antisense region
acucugccagguucagggc

SEQ ID NO: 1983 - DNA, 21 bp, Artificial Sequence
  Description of Artificial Sequence: Target Sequence/siNA sense region (stab00)
  misc_feature (1)..(19): ribonucleotide unmodified or modified as described for this sequence
gcccugaaccuggcagagutt

SEQ ID NO: 1984 - DNA, 21 bp, Artificial Sequence
  Description of Artificial Sequence: Target Sequence/siNA antisense region (stab00as)
  misc_feature (1)..(19): ribonucleotide unmodified or modified as described for this sequence
acucugccagguucagggctt

SEQ ID NO: 1985 - DNA, 21 bp, Artificial Sequence
  Description of Artificial Sequence: Target Sequence/siNA sense region (stab04)
  misc_feature (1)..(1): 5'-3 attached terminal deoxyabasic moiety, inverted abasic, inverted nucleotide or other terminal cap that is optionally present
  misc_feature (21)..(21): 3'-3 attached terminal deoxyabasic moiety, inverted abasic, inverted nucleotide or other terminal cap that is optionally present
  misc_feature (2)..(5): 2'-deoxy-2'Fluoro
  misc_feature (9)..(11): 2'-deoxy-2'Fluoro
  misc_feature (14)..(14): 2'-deoxy-2'Fluoro
  misc_feature (19)..(19): 2'-deoxy-2'Fluoro
  misc_feature (1)..(19): ribonucleotide unmodified or modified as described for this sequence
gcccugaaccuggcagagutt

SEQ ID NO: 1986 - DNA, 21 bp, Artificial Sequence
  Description of Artificial Sequence: Target Sequence/siNA antisense region (stab05)
  misc_feature (2)..(5): 2'-deoxy-2'Fluoro
  misc_feature (7)..(8): 2'-deoxy-2'Fluoro
  misc_feature (12)..(14): 2'-deoxy-2'Fluoro
  misc_feature (19)..(19): 2'-deoxy-2'Fluoro
  misc_feature (20)..(20): Phosphorothioate or Phosphorodithioate 3'-Internucleotide Linkage (optionally present)
  misc_feature (1)..(19): ribonucleotide unmodified or modified as described for this sequence
acucugccagguucagggctt

SEQ ID NO: 1987 - DNA, 21 bp, Artificial Sequence
  Description of Artificial Sequence: Target Sequence/siNA sense region (stab07)
  misc_feature (1)..(1): 5'-3 attached terminal deoxyabasic moiety, inverted abasic, inverted nucleotide or other terminal cap that is optionally present
  misc_feature (21)..(21): 3'-3 attached terminal deoxyabasic moiety, inverted abasic, inverted nucleotide or other terminal cap that is optionally present
  misc_feature (2)..(5): 2'-deoxy-2'Fluoro
  misc_feature (9)..(11): 2'-deoxy-2'Fluoro
  misc_feature (14)..(14): 2'-deoxy-2'Fluoro
  misc_feature (19)..(19): 2'-deoxy-2'Fluoro
  misc_feature (1)..(19): ribonucleotide unmodified or modified as described for this sequence
gcccugaaccuggcagagutt

SEQ ID NO: 1988 - DNA, 21 bp, Artificial Sequence
  Description of Artificial Sequence: Target Sequence/siNA antisense region (stab08)
  misc_feature (1)..(1): 2'-O-methyl
  misc_feature (2)..(5): 2'-deoxy-2'Fluoro
  misc_feature (6)..(6): 2'-O-methyl
  misc_feature (7)..(8): 2'-deoxy-2'Fluoro
  misc_feature (9)..(11): 2'-O-methyl
  misc_feature (12)..(14): 2'-deoxy-2'Fluoro
  misc_feature (15)..(18): 2'-O-methyl
  misc_feature (19)..(19): 2'-deoxy-2'Fluoro
  misc_feature (20)..(20): Phosphorothioate or Phosphorodithioate 3'-Internucleotide Linkage (optionally present)
  misc_feature (1)..(19): ribonucleotide unmodified or modified as described for this sequence
acucugccagguucagggctt

SEQ ID NO: 1989 - DNA, 21 bp, Artificial Sequence
  Description of Artificial Sequence: Target Sequence/siNA sense region (stab09)
  misc_feature (1)..(1): 5'-3 attached terminal deoxyabasic moiety, inverted abasic, inverted nucleotide or other terminal cap that is optionally present
  misc_feature (21)..(21): 3'-3 attached terminal deoxyabasic moiety, inverted abasic, inverted nucleotide or other terminal cap that is optionally present
  misc_feature (1)..(19): ribonucleotide unmodified or modified as described for this sequence
gcccugaaccuggcagagutt

SEQ ID NO: 1990 - DNA, 21 bp, Artificial Sequence
  Description of Artificial Sequence: Target Sequence/siNA antisense region (stab10)
  misc_feature (20)..(20): Phosphorothioate or Phosphorodithioate 3'-Internucleotide Linkage (optionally present)
  misc_feature (1)..(19): ribonucleotide unmodified or modified as described for this sequence
acucugccagguucagggctt

SEQ ID NO: 1991 - DNA, 21 bp, Artificial Sequence
  Description of Artificial Sequence: Target Sequence/siNA antisense region (stab19)
  misc_feature (21)..(21): 3'-3 attached terminal deoxyabasic moiety, inverted abasic, inverted nucleotide or other terminal cap that is optionally present
  misc_feature (1)..(1): 2'-O-methyl
  misc_feature (2)..(5): 2'-deoxy-2'Fluoro
  misc_feature (6)..(6): 2'-O-methyl
  misc_feature (7)..(8): 2'-deoxy-2'Fluoro
  misc_feature (9)..(11): 2'-O-methyl
  misc_feature (12)..(14): 2'-deoxy-2'Fluoro
  misc_feature (15)..(18): 2'-O-methyl
  misc_feature (19)..(19): 2'-deoxy-2'Fluoro
  misc_feature (1)..(19): ribonucleotide unmodified or modified as described for this sequence
acucugccagguucagggctt

SEQ ID NO: 1992 - DNA, 21 bp, Artificial Sequence
  Description of Artificial Sequence: Target Sequence/siNA antisense region (stab22)
  misc_feature (21)..(21): 3'-3 attached terminal deoxyabasic moiety, inverted abasic, inverted nucleotide or other terminal cap that is optionally present
  misc_feature (20)..(20): Phosphorothioate or Phosphorodithioate 3'-Internucleotide Linkage (optionally present)
  misc_feature (1)..(19): ribonucleotide unmodified or modified as described for this sequence
acucugccagguucagggctt

SEQ ID NO: 1993 - DNA, 21 bp, Artificial Sequence
  Description of Artificial Sequence: Target Sequence/siNA antisense region (stab25)
  misc_feature (4)..(5): 2'-deoxy-2'Fluoro
  misc_feature (6)..(6): 2'-O-methyl
  misc_feature (7)..(8): 2'-deoxy-2'Fluoro
  misc_feature (9)..(11): 2'-O-methyl
  misc_feature (12)..(14): 2'-deoxy-2'Fluoro
  misc_feature (15)..(18): 2'-O-methyl
  misc_feature (19)..(19): 2'-deoxy-2'Fluoro
  misc_feature (20)..(20): Phosphorothioate or Phosphorodithioate 3'-Internucleotide Linkage (optionally present)
  misc_feature (1)..(19): ribonucleotide unmodified or modified as described for this sequence
acucugccagguucagggctt

SEQ ID NO: 1994 - RNA, 21 nt, Artificial Sequence
  Description of Artificial Sequence: Target Sequence/siNA antisense region (stab35)
  misc_feature (4)..(5): 2'-deoxy-2'Fluoro
  misc_feature (6)..(6): 2'-O-methyl
  misc_feature (7)..(8): 2'-deoxy-2'Fluoro
  misc_feature (9)..(11): 2'-O-methyl
  misc_feature (12)..(14): 2'-deoxy-2'Fluoro
  misc_feature (15)..(18): 2'-O-methyl
  misc_feature (19)..(19): 2'-deoxy-2'Fluoro
  misc_feature (20)..(21): 2'-O-methyl
acucugccagguucagggcuu

SEQ ID NO: 1995 - RNA, 21 nt, Artificial Sequence
  Description of Artificial Sequence: Target Sequence/siNA antisense region (stab36)
  misc_feature (4)..(5): 2'-deoxy-2'Fluoro
  misc_feature (6)..(6): 2'-O-methyl
  misc_feature (7)..(8): 2'-deoxy-2'Fluoro
  misc_feature (9)..(11): 2'-O-methyl
  misc_feature (12)..(14): 2'-deoxy-2'Fluoro
  misc_feature (15)..(18): 2'-O-methyl
  misc_feature (19)..(19): 2'-deoxy-2'Fluoro
  misc_feature (20)..(21): 2'-O-methyl
acucugccagguucagggcac

SEQ ID NO: 1996 - RNA, 19 nt, Artificial Sequence
  Description of Artificial Sequence: Target Sequence/siNA sense region
ugugcaggggaugccgugu

SEQ ID NO: 1997 - RNA, 19 nt, Artificial Sequence
  Description of Artificial Sequence: Target Sequence/siNA antisense region
acacggcauccccugcaca

SEQ ID NO: 1998 - DNA, 21 bp, Artificial Sequence
  Description of Artificial Sequence: Target Sequence/siNA sense region (stab00)
  misc_feature (1)..(19): ribonucleotide unmodified or modified as described for this sequence
ugugcaggggaugccgugutt

SEQ ID NO: 1999 - DNA, 21 bp, Artificial Sequence
  Description of Artificial Sequence: Target Sequence/siNA antisense region (stab00as)
  misc_feature (1)..(19): ribonucleotide unmodified or modified as described for this sequence
acacggcauccccugcacatt

SEQ ID NO: 2000 - DNA, 21 bp, Artificial Sequence
  Description of Artificial Sequence: Target Sequence/siNA sense region (stab04)
  misc_feature (1)..(1): 5'-3 attached terminal deoxyabasic moiety, inverted abasic, inverted nucleotide or other terminal cap that is optionally present
  misc_feature (21)..(21): 3'-3 attached terminal deoxyabasic moiety, inverted abasic, inverted nucleotide or other terminal cap that is optionally present
  misc_feature (1)..(1): 2'-deoxy-2'Fluoro
  misc_feature (3)..(3): 2'-deoxy-2'Fluoro
  misc_feature (5)..(5): 2'-deoxy-2'Fluoro
  misc_feature (12)..(12): 2'-deoxy-2'Fluoro
  misc_feature (14)..(15): 2'-deoxy-2'Fluoro
  misc_feature (17)..(17): 2'-deoxy-2'Fluoro
  misc_feature (19)..(19): 2'-deoxy-2'Fluoro
  misc_feature (1)..(19): ribonucleotide unmodified or modified as described for this sequence
ugugcaggggaugccgugutt

SEQ ID NO: 2001 - DNA, 21 bp, Artificial Sequence
  Description of Artificial Sequence: Target Sequence/siNA antisense region (stab05)
  misc_feature (2)..(2): 2'-deoxy-2'Fluoro
  misc_feature (4)..(4): 2'-deoxy-2'Fluoro
  misc_feature (7)..(7): 2'-deoxy-2'Fluoro
  misc_feature (9)..(14): 2'-deoxy-2'Fluoro
  misc_feature (16)..(16): 2'-deoxy-2'Fluoro
  misc_feature (18)..(18): 2'-deoxy-2'Fluoro
  misc_feature (20)..(20): Phosphorothioate or Phosphorodithioate 3'-Internucleotide Linkage (optionally present)
  misc_feature (1)..(19): ribonucleotide unmodified or modified as described for this sequence
acacggcauccccugcacatt

SEQ ID NO: 2002 - DNA, 21 bp, Artificial Sequence
  Description of Artificial Sequence: Target Sequence/siNA sense region (stab07)
  misc_feature (1)..(1): 5'-3 attached terminal deoxyabasic moiety, inverted abasic, inverted nucleotide or other terminal cap that is optionally present
  misc_feature (21)..(21): 3'-3 attached terminal deoxyabasic moiety, inverted abasic, inverted nucleotide or other terminal cap that is optionally present
  misc_feature (1)..(1): 2'-deoxy-2'Fluoro
  misc_feature (3)..(3): 2'-deoxy-2'Fluoro
  misc_feature (5)..(5): 2'-deoxy-2'Fluoro
  misc_feature (12)..(12): 2'-deoxy-2'Fluoro
  misc_feature (14)..(15): 2'-deoxy-2'Fluoro
  misc_feature (17)..(17): 2'-deoxy-2'Fluoro
  misc_feature (19)..(19): 2'-deoxy-2'Fluoro
  misc_feature (1)..(19): ribonucleotide unmodified or modified as described for this sequence
ugugcaggggaugccgugutt

SEQ ID NO: 2003 - DNA, 21 bp, Artificial Sequence
  Description of Artificial Sequence: Target Sequence/siNA antisense region (stab08)
  misc_feature (1)..(1): 2'-O-methyl
  misc_feature (2)..(2): 2'-deoxy-2'Fluoro
  misc_feature (3)..(3): 2'-O-methyl
  misc_feature (4)..(4): 2'-deoxy-2'Fluoro
  misc_feature (5)..(6): 2'-O-methyl
  misc_feature (7)..(7): 2'-deoxy-2'Fluoro
  misc_feature (8)..(8): 2'-O-methyl
  misc_feature (9)..(14): 2'-deoxy-2'Fluoro
  misc_feature (15)..(15): 2'-O-methyl
  misc_feature (16)..(16): 2'-deoxy-2'Fluoro
  misc_feature (17)..(17): 2'-O-methyl
  misc_feature (18)..(18): 2'-deoxy-2'Fluoro
  misc_feature (19)..(19): 2'-O-methyl
  misc_feature (20)..(20): Phosphorothioate or Phosphorodithioate 3'-Internucleotide Linkage (optionally present)
  misc_feature (1)..(19): ribonucleotide unmodified or modified as described for this sequence
acacggcauccccugcacatt

SEQ ID NO: 2004 - DNA, 21 bp, Artificial Sequence
  Description of Artificial Sequence: Target Sequence/siNA sense region (stab09)
  misc_feature (1)..(1): 5'-3 attached terminal deoxyabasic moiety, inverted abasic, inverted nucleotide or other terminal cap that is optionally present
  misc_feature (21)..(21): 3'-3 attached terminal deoxyabasic moiety, inverted abasic, inverted nucleotide or other terminal cap that is optionally present
  misc_feature (1)..(19): ribonucleotide unmodified or modified as described for this sequence
ugugcaggggaugccgugutt

SEQ ID NO: 2005 - DNA, 21 bp, Artificial Sequence
  Description of Artificial Sequence: Target Sequence/siNA antisense region (stab10)
  misc_feature (20)..(20): Phosphorothioate or Phosphorodithioate 3'-Internucleotide Linkage (optionally present)
  misc_feature (1)..(19): ribonucleotide unmodified or modified as described for this sequence
acacggcauccccugcacatt

SEQ ID NO: 2006 - DNA, 21 bp, Artificial Sequence
  Description of Artificial Sequence: Target Sequence/siNA antisense region (stab19)
  misc_feature (21)..(21): 3'-3 attached terminal deoxyabasic moiety, inverted abasic, inverted nucleotide or other terminal cap that is optionally present
  misc_feature (1)..(1): 2'-O-methyl
  misc_feature (2)..(2): 2'-deoxy-2'Fluoro
  misc_feature (3)..(3): 2'-O-methyl
  misc_feature (4)..(4): 2'-deoxy-2'Fluoro
  misc_feature (5)..(6): 2'-O-methyl
  misc_feature (7)..(7): 2'-deoxy-2'Fluoro
  misc_feature (8)..(8): 2'-O-methyl
  misc_feature (9)..(14): 2'-deoxy-2'Fluoro
  misc_feature (15)..(15): 2'-O-methyl
  misc_feature (16)..(16): 2'-deoxy-2'Fluoro
  misc_feature (17)..(17): 2'-O-methyl
  misc_feature (18)..(18): 2'-deoxy-2'Fluoro
  misc_feature (19)..(19): 2'-O-methyl
  misc_feature (1)..(19): ribonucleotide unmodified or modified as described for this sequence
acacggcauccccugcacatt

SEQ ID NO: 2007 - DNA, 21 bp, Artificial Sequence
  Description of Artificial Sequence: Target Sequence/siNA antisense region (stab22)
  misc_feature (21)..(21): 3'-3 attached terminal deoxyabasic moiety, inverted abasic, inverted nucleotide or other terminal cap that is optionally present
  misc_feature (20)..(20): Phosphorothioate or Phosphorodithioate 3'-Internucleotide Linkage (optionally present)
  misc_feature (1)..(19): ribonucleotide unmodified or modified as described for this sequence
acacggcauccccugcacatt

SEQ ID NO: 2008 - DNA, 21 bp, Artificial Sequence
  Description of Artificial Sequence: Target Sequence/siNA antisense region (stab25)
  misc_feature (4)..(4): 2'-deoxy-2'Fluoro
  misc_feature (5)..(6): 2'-O-methyl
  misc_feature (7)..(7): 2'-deoxy-2'Fluoro
  misc_feature (8)..(8): 2'-O-methyl
  misc_feature (9)..(14): 2'-deoxy-2'Fluoro
  misc_feature (15)..(15): 2'-O-methyl
  misc_feature (16)..(16): 2'-deoxy-2'Fluoro
  misc_feature (17)..(17): 2'-O-methyl
  misc_feature (18)..(18): 2'-deoxy-2'Fluoro
  misc_feature (19)..(19): 2'-O-methyl
  misc_feature (20)..(20): Phosphorothioate or Phosphorodithioate 3'-Internucleotide Linkage (optionally present)
  misc_feature (1)..(19): ribonucleotide unmodified or modified as described for this sequence
acacggcauccccugcacatt

SEQ ID NO: 2009 - RNA, 21 nt, Artificial Sequence
  Description of Artificial Sequence: Target Sequence/siNA antisense region (stab35)
  misc_feature (4)..(4): 2'-deoxy-2'Fluoro
  misc_feature (5)..(6): 2'-O-methyl
  misc_feature (7)..(7): 2'-deoxy-2'Fluoro
  misc_feature (8)..(8): 2'-O-methyl
  misc_feature (9)..(14): 2'-deoxy-2'Fluoro
  misc_feature (15)..(15): 2'-O-methyl
  misc_feature (16)..(16): 2'-deoxy-2'Fluoro
  misc_feature (17)..(17): 2'-O-methyl
  misc_feature (18)..(18): 2'-deoxy-2'Fluoro
  misc_feature (19)..(21): 2'-O-methyl
acacggcauccccugcacauu

SEQ ID NO: 2010 - RNA, 21 nt, Artificial Sequence
  Description of Artificial Sequence: Target Sequence/siNA antisense region (stab36)
  misc_feature (4)..(4): 2'-deoxy-2'Fluoro
  misc_feature (5)..(6): 2'-O-methyl
  misc_feature (7)..(7): 2'-deoxy-2'Fluoro
  misc_feature (8)..(8): 2'-O-methyl
  misc_feature (9)..(14): 2'-deoxy-2'Fluoro
  misc_feature (15)..(15): 2'-O-methyl
  misc_feature (16)..(16): 2'-deoxy-2'Fluoro
  misc_feature (17)..(17): 2'-O-methyl
  misc_feature (18)..(18): 2'-deoxy-2'Fluoro
  misc_feature (19)..(21): 2'-O-methyl
acacggcauccccugcacacu

SEQ ID NO: 2011 - RNA, 19 nt, Artificial Sequence
  Description of Artificial Sequence: Target Sequence/siNA sense region
ucuguggcgacgcuggccg

SEQ ID NO: 2012 - RNA, 19 nt, Artificial Sequence
  Description of Artificial Sequence: Target Sequence/siNA antisense region
cggccagcgucgccacaga

SEQ ID NO: 2013 - DNA, 21 bp, Artificial Sequence
  Description of Artificial Sequence: Target Sequence/siNA sense region (stab00)
  misc_feature (1)..(19): ribonucleotide unmodified or modified as described for this sequence
ucuguggcgacgcuggccgtt

SEQ ID NO: 2014 - DNA, 21 bp, Artificial Sequence
  Description of Artificial Sequence: Target Sequence/siNA antisense region (stab00as)
  misc_feature (1)..(19): ribonucleotide unmodified or modified as described for this sequence
cggccagcgucgccacagatt

SEQ ID NO: 2015 - DNA, 21 bp, Artificial Sequence
  Description of Artificial Sequence: Target Sequence/siNA sense region (stab04)
  misc_feature (1)..(1): 5'-3 attached terminal deoxyabasic moiety, inverted abasic, inverted nucleotide or other terminal cap that is optionally present
  misc_feature (21)..(21): 3'-3 attached terminal deoxyabasic moiety, inverted abasic, inverted nucleotide or other terminal cap that is optionally present
  misc_feature (1)..(3): 2'-deoxy-2'Fluoro
  misc_feature (5)..(5): 2'-deoxy-2'Fluoro
  misc_feature (8)..(8): 2'-deoxy-2'Fluoro
  misc_feature (11)..(11): 2'-deoxy-2'Fluoro
  misc_feature (13)..(14): 2'-deoxy-2'Fluoro
  misc_feature (17)..(18): 2'-deoxy-2'Fluoro
  misc_feature (1)..(19): ribonucleotide unmodified or modified as described for this sequence
ucuguggcgacgcuggccgtt

SEQ ID NO: 2016 - DNA, 21 bp, Artificial Sequence
  Description of Artificial Sequence: Target Sequence/siNA antisense region (stab05)
  misc_feature (1)..(1): 2'-deoxy-2'Fluoro
  misc_feature (4)..(5): 2'-deoxy-2'Fluoro
  misc_feature (8)..(8): 2'-deoxy-2'Fluoro
  misc_feature (10)..(11): 2'-deoxy-2'Fluoro
  misc_feature (13)..(14): 2'-deoxy-2'Fluoro
  misc_feature (16)..(16): 2'-deoxy-2'Fluoro
  misc_feature (20)..(20): Phosphorothioate or Phosphorodithioate 3'-Internucleotide Linkage (optionally present)
  misc_feature (1)..(19): ribonucleotide unmodified or modified as described for this sequence
cggccagcgucgccacagatt

SEQ ID NO: 2017 - DNA, 21 bp, Artificial Sequence
  Description of Artificial Sequence: Target Sequence/siNA sense region (stab07)
  misc_feature (1)..(1): 5'-3 attached terminal deoxyabasic moiety, inverted abasic, inverted nucleotide or other terminal cap that is optionally present
  misc_feature (21)..(21): 3'-3 attached terminal deoxyabasic moiety, inverted abasic, inverted nucleotide or other terminal cap that is optionally present
  misc_feature (1)..(3): 2'-deoxy-2'Fluoro
  misc_feature (5)..(5): 2'-deoxy-2'Fluoro
  misc_feature (8)..(8): 2'-deoxy-2'Fluoro
  misc_feature (11)..(11): 2'-deoxy-2'Fluoro
  misc_feature (13)..(14): 2'-deoxy-2'Fluoro
  misc_feature (17)..(18): 2'-deoxy-2'Fluoro
  misc_feature (1)..(19): ribonucleotide unmodified or modified as described for this sequence
ucuguggcgacgcuggccgtt

SEQ ID NO: 2018 - DNA, 21 bp, Artificial Sequence
  Description of Artificial Sequence: Target Sequence/siNA antisense region (stab08)
  misc_feature (1)..(1): 2'-deoxy-2'Fluoro
  misc_feature (2)..(3): 2'-O-methyl
  misc_feature (4)..(5): 2'-deoxy-2'Fluoro
  misc_feature (6)..(7): 2'-O-methyl
  misc_feature (8)..(8): 2'-deoxy-2'Fluoro
  misc_feature (9)..(9): 2'-O-methyl
  misc_feature (10)..(11): 2'-deoxy-2'Fluoro
  misc_feature (12)..(12): 2'-O-methyl
  misc_feature (13)..(14): 2'-deoxy-2'Fluoro
  misc_feature (15)..(15): 2'-O-methyl
  misc_feature (16)..(16): 2'-deoxy-2'Fluoro
  misc_feature (17)..(19): 2'-O-methyl
  misc_feature (20)..(20): Phosphorothioate or Phosphorodithioate 3'-Internucleotide Linkage (optionally present)
  misc_feature (1)..(19): ribonucleotide unmodified or modified as described for this sequence
cggccagcgucgccacagatt

SEQ ID NO: 2019 - DNA, 21 bp, Artificial Sequence
  Description of Artificial Sequence: Target Sequence/siNA sense region (stab09)
  misc_feature (1)..(1): 5'-3 attached terminal deoxyabasic moiety, inverted abasic, inverted nucleotide or other terminal cap that is optionally present
  misc_feature (21)..(21): 3'-3 attached terminal deoxyabasic moiety, inverted abasic, inverted nucleotide or other terminal cap that is optionally present
  misc_feature (1)..(19): ribonucleotide unmodified or modified as described for this sequence
ucuguggcgacgcuggccgtt

SEQ ID NO: 2020 - DNA, 21 bp, Artificial Sequence
  Description of Artificial Sequence: Target Sequence/siNA antisense region (stab10)
  misc_feature (20)..(20): Phosphorothioate or Phosphorodithioate 3'-Internucleotide Linkage (optionally present)
  misc_feature (1)..(19): ribonucleotide unmodified or modified as described for this sequence
cggccagcgucgccacagatt

SEQ ID NO: 2021 - DNA, 21 bp, Artificial Sequence
  Description of Artificial Sequence: Target Sequence/siNA antisense region (stab19)
  misc_feature (21)..(21): 3'-3 attached terminal deoxyabasic moiety, inverted abasic, inverted nucleotide or other terminal cap that is optionally present
  misc_feature (1)..(1): 2'-deoxy-2'Fluoro
  misc_feature (2)..(3): 2'-O-methyl
  misc_feature (4)..(5): 2'-deoxy-2'Fluoro
  misc_feature (6)..(7): 2'-O-methyl
  misc_feature (8)..(8): 2'-deoxy-2'Fluoro
  misc_feature (9)..(9): 2'-O-methyl
  misc_feature (10)..(11): 2'-deoxy-2'Fluoro
  misc_feature (12)..(12): 2'-O-methyl
  misc_feature (13)..(14): 2'-deoxy-2'Fluoro
  misc_feature (15)..(15): 2'-O-methyl
  misc_feature (16)..(16): 2'-deoxy-2'Fluoro
  misc_feature (17)..(19): 2'-O-methyl
  misc_feature (1)..(19): ribonucleotide unmodified or modified as described for this sequence
cggccagcgucgccacagatt

SEQ ID NO: 2022 - DNA, 21 bp, Artificial Sequence
  Description of Artificial Sequence: Target Sequence/siNA antisense region (stab22)
  misc_feature (21)..(21): 3'-3 attached terminal deoxyabasic moiety, inverted abasic, inverted nucleotide or other terminal cap that is optionally present
  misc_feature (20)..(20): Phosphorothioate or Phosphorodithioate 3'-Internucleotide Linkage (optionally present)
  misc_feature (1)..(19): ribonucleotide unmodified or modified as described for this sequence
cggccagcgucgccacagatt

SEQ ID NO: 2023 - DNA, 21 bp, Artificial Sequence
  Description of Artificial Sequence: Target Sequence/siNA antisense region (stab25)
  misc_feature (4)..(5): 2'-deoxy-2'Fluoro
  misc_feature (6)..(7): 2'-O-methyl
  misc_feature (8)..(8): 2'-deoxy-2'Fluoro
  misc_feature (9)..(9): 2'-O-methyl
  misc_feature (10)..(11): 2'-deoxy-2'Fluoro
  misc_feature (12)..(12): 2'-O-methyl
  misc_feature (13)..(14): 2'-deoxy-2'Fluoro
  misc_feature (15)..(15): 2'-O-methyl
  misc_feature (16)..(16): 2'-deoxy-2'Fluoro
  misc_feature (17)..(19): 2'-O-methyl
  misc_feature (20)..(20): Phosphorothioate or Phosphorodithioate 3'-Internucleotide Linkage (optionally present)
  misc_feature (1)..(19): ribonucleotide unmodified or modified as described for this sequence
cggccagcgucgccacagatt

SEQ ID NO: 2024 - RNA, 21 nt, Artificial Sequence
  Description of Artificial Sequence: Target Sequence/siNA antisense region (stab35)
  misc_feature (4)..(5): 2'-deoxy-2'Fluoro
  misc_feature (6)..(7): 2'-O-methyl
  misc_feature (8)..(8): 2'-deoxy-2'Fluoro
  misc_feature (9)..(9): 2'-O-methyl
  misc_feature (10)..(11): 2'-deoxy-2'Fluoro
  misc_feature (12)..(12): 2'-O-methyl
  misc_feature (13)..(14): 2'-deoxy-2'Fluoro
  misc_feature (15)..(15): 2'-O-methyl
  misc_feature (16)..(16): 2'-deoxy-2'Fluoro
  misc_feature (17)..(21): 2'-O-methyl
cggccagcgucgccacagauu

SEQ ID NO: 2025 - RNA, 21 nt, Artificial Sequence
  Description of Artificial Sequence: Target Sequence/siNA antisense region (stab36)
  misc_feature (4)..(5): 2'-deoxy-2'Fluoro
  misc_feature (6)..(7): 2'-O-methyl
  misc_feature (8)..(8): 2'-deoxy-2'Fluoro
  misc_feature (9)..(9): 2'-O-methyl
  misc_feature (10)..(11): 2'-deoxy-2'Fluoro
  misc_feature (12)..(12): 2'-O-methyl
  misc_feature (13)..(14): 2'-deoxy-2'Fluoro
  misc_feature (15)..(15): 2'-O-methyl
  misc_feature (16)..(16): 2'-deoxy-2'Fluoro
  misc_feature (17)..(21): 2'-O-methyl
cggccagcgucgccacagaca

SEQ ID NO: 2026 - RNA, 19 nt, Artificial Sequence
  Description of Artificial Sequence: Target Sequence/siNA sense region
gagaucuauguggcggcug

SEQ ID NO: 2027 - RNA, 19 nt, Artificial Sequence
  Description of Artificial Sequence: Target Sequence/siNA antisense region
cagccgccacauagaucuc

SEQ ID NO: 2028 - DNA, 21 bp, Artificial Sequence
  Description of Artificial Sequence: Target Sequence/siNA sense region (stab00)
  misc_feature (1)..(19): ribonucleotide unmodified or modified as described for this sequence
gagaucuauguggcggcugtt

SEQ ID NO: 2029 - DNA, 21 bp, Artificial Sequence
  Description of Artificial Sequence: Target Sequence/siNA antisense region (stab00as)
  misc_feature (1)..(19): ribonucleotide unmodified or modified as described for this sequence
cagccgccacauagaucuctt

SEQ ID NO: 2030 - DNA, 21 bp, Artificial Sequence
  Description of Artificial Sequence: Target Sequence/siNA sense region (stab04)
  misc_feature (1)..(1): 5'-3 attached terminal deoxyabasic moiety, inverted abasic, inverted nucleotide or other terminal cap that is optionally present
  misc_feature (21)..(21): 3'-3 attached terminal deoxyabasic moiety, inverted abasic, inverted nucleotide or other terminal cap that is optionally present
  misc_feature (5)..(7): 2'-deoxy-2'Fluoro
  misc_feature (9)..(9): 2'-deoxy-2'Fluoro
  misc_feature (11)..(11): 2'-deoxy-2'Fluoro
  misc_feature (14)..(14): 2'-deoxy-2'Fluoro
  misc_feature (17)..(18): 2'-deoxy-2'Fluoro
  misc_feature (1)..(19): ribonucleotide unmodified or modified as described for this sequence
gagaucuauguggcggcugtt

SEQ ID NO: 2031 - DNA, 21 bp, Artificial Sequence
  Description of Artificial Sequence: Target Sequence/siNA antisense region (stab05)
  misc_feature (1)..(1): 2'-deoxy-2'Fluoro
  misc_feature (4)..(5): 2'-deoxy-2'Fluoro
  misc_feature (7)..(8): 2'-deoxy-2'Fluoro
  misc_feature (10)..(10): 2'-deoxy-2'Fluoro
  misc_feature (12)..(12): 2'-deoxy-2'Fluoro
  misc_feature (16)..(19): 2'-deoxy-2'Fluoro
  misc_feature (20)..(20): Phosphorothioate or Phosphorodithioate 3'-Internucleotide Linkage (optionally present)
  misc_feature (1)..(19): ribonucleotide unmodified or modified as described for this sequence
cagccgccacauagaucuctt

SEQ ID NO: 2032 - DNA, 21 bp, Artificial Sequence
  Description of Artificial Sequence: Target Sequence/siNA sense region (stab07)
  misc_feature (1)..(1): 5'-3 attached terminal deoxyabasic moiety, inverted abasic, inverted nucleotide or other terminal cap that is optionally present
  misc_feature (21)..(21): 3'-3 attached terminal deoxyabasic moiety, inverted abasic, inverted nucleotide or other terminal cap that is optionally present
  misc_feature (5)..(7): 2'-deoxy-2'Fluoro
  misc_feature (9)..(9): 2'-deoxy-2'Fluoro
  misc_feature (11)..(11): 2'-deoxy-2'Fluoro
  misc_feature (14)..(14): 2'-deoxy-2'Fluoro
  misc_feature (17)..(18): 2'-deoxy-2'Fluoro
  misc_feature (1)..(19): ribonucleotide unmodified or modified as described for this sequence
gagaucuauguggcggcugtt

SEQ ID NO: 2033 - DNA, 21 bp, Artificial Sequence
  Description of Artificial Sequence: Target Sequence/siNA antisense region (stab08)
  misc_feature (1)..(1): 2'-deoxy-2'Fluoro
  misc_feature (2)..(3): 2'-O-methyl
  misc_feature (4)..(5): 2'-deoxy-2'Fluoro
  misc_feature (6)..(6): 2'-O-methyl
  misc_feature (7)..(8): 2'-deoxy-2'Fluoro
  misc_feature (9)..(9): 2'-O-methyl
  misc_feature (10)..(10): 2'-deoxy-2'Fluoro
  misc_feature (11)..(11): 2'-O-methyl
  misc_feature (12)..(12): 2'-deoxy-2'Fluoro
  misc_feature (13)..(15): 2'-O-methyl
  misc_feature (16)..(19): 2'-deoxy-2'Fluoro
  misc_feature (20)..(20): Phosphorothioate or Phosphorodithioate 3'-Internucleotide Linkage (optionally present)
  misc_feature (1)..(19): ribonucleotide unmodified or modified as described for this sequence
cagccgccacauagaucuctt

SEQ ID NO: 2034 - DNA, 21 bp, Artificial Sequence
  Description of Artificial Sequence: Target Sequence/siNA sense region (stab09)
  misc_feature (1)..(1): 5'-3 attached terminal deoxyabasic moiety, inverted abasic, inverted nucleotide or other terminal cap that is optionally present
  misc_feature (21)..(21): 3'-3 attached terminal deoxyabasic moiety, inverted abasic, inverted nucleotide or other terminal cap that is optionally present
  misc_feature (1)..(19): ribonucleotide unmodified or modified as described for this sequence
gagaucuauguggcggcugtt

SEQ ID NO: 2035 - DNA, 21 bp, Artificial Sequence
  Description of Artificial Sequence: Target Sequence/siNA antisense region (stab10)
  misc_feature (20)..(20): Phosphorothioate or Phosphorodithioate 3'-Internucleotide Linkage (optionally present)
  misc_feature (1)..(19): ribonucleotide unmodified or modified as described for this sequence
cagccgccacauagaucuctt

SEQ ID NO: 2036 - DNA, 21 bp, Artificial Sequence
  Description of Artificial Sequence: Target Sequence/siNA antisense region (stab19)
  misc_feature (21)..(21): 3'-3 attached terminal deoxyabasic moiety, inverted abasic, inverted nucleotide or other terminal cap that is optionally present
  misc_feature (1)..(1): 2'-deoxy-2'Fluoro
  misc_feature (2)..(3): 2'-O-methyl
  misc_feature (4)..(5): 2'-deoxy-2'Fluoro
  misc_feature (6)..(6): 2'-O-methyl
  misc_feature (7)..(8): 2'-deoxy-2'Fluoro
  misc_feature (9)..(9): 2'-O-methyl
  misc_feature (10)..(10): 2'-deoxy-2'Fluoro
  misc_feature (11)..(11): 2'-O-methyl
  misc_feature (12)..(12): 2'-deoxy-2'Fluoro
  misc_feature (13)..(15): 2'-O-methyl
  misc_feature (16)..(19): 2'-deoxy-2'Fluoro
  misc_feature (1)..(19): ribonucleotide unmodified or modified as described for this sequence
cagccgccacauagaucuctt

SEQ ID NO: 2037 - DNA, 21 bp, Artificial Sequence
  Description of Artificial Sequence: Target Sequence/siNA antisense region (stab22)
  misc_feature (21)..(21): 3'-3 attached terminal deoxyabasic moiety, inverted abasic, inverted nucleotide or other terminal cap that is optionally present
  misc_feature (20)..(20): Phosphorothioate or Phosphorodithioate 3'-Internucleotide Linkage (optionally present)
  misc_feature (1)..(19): ribonucleotide unmodified or modified as described for this sequence
cagccgccacauagaucuctt

SEQ ID NO: 2038 - DNA, 21 bp, Artificial Sequence
  Description of Artificial Sequence: Target Sequence/siNA antisense region (stab25)
  misc_feature (4)..(5): 2'-deoxy-2'Fluoro
  misc_feature (6)..(6): 2'-O-methyl
  misc_feature (7)..(8): 2'-deoxy-2'Fluoro
  misc_feature (9)..(9): 2'-O-methyl
  misc_feature (10)..(10): 2'-deoxy-2'Fluoro
  misc_feature (11)..(11): 2'-O-methyl
  misc_feature (12)..(12): 2'-deoxy-2'Fluoro
  misc_feature (13)..(15): 2'-O-methyl
  misc_feature (16)..(19): 2'-deoxy-2'Fluoro
  misc_feature (20)..(20): Phosphorothioate or Phosphorodithioate 3'-Internucleotide Linkage (optionally present)
  misc_feature (1)..(3): ribonucleotide
cagccgccacauagaucuctt

SEQ ID NO: 2039 - RNA, 21 nt, Artificial Sequence
  Description of Artificial Sequence: Target Sequence/siNA antisense region (stab35)
  misc_feature (4)..(5): 2'-deoxy-2'Fluoro
  misc_feature (6)..(6): 2'-O-methyl
  misc_feature (7)..(8): 2'-deoxy-2'Fluoro
  misc_feature (9)..(9): 2'-O-methyl
  misc_feature (10)..(10): 2'-deoxy-2'Fluoro
  misc_feature (11)..(11): 2'-O-methyl
  misc_feature (12)..(12): 2'-deoxy-2'Fluoro
  misc_feature (13)..(15): 2'-O-methyl
  misc_feature (16)..(19): 2'-deoxy-2'Fluoro
  misc_feature (20)..(21): 2'-O-methyl
cagccgccacauagaucucuu

SEQ ID NO: 2040 - RNA, 21 nt, Artificial Sequence
  Description of Artificial Sequence: Target Sequence/siNA antisense region (stab36)
  misc_feature (4)..(5): 2'-deoxy-2'Fluoro
  misc_feature (6)..(6): 2'-O-methyl
  misc_feature (7)..(8): 2'-deoxy-2'Fluoro
  misc_feature (9)..(9): 2'-O-methyl
  misc_feature (10)..(10): 2'-deoxy-2'Fluoro
  misc_feature (11)..(11): 2'-O-methyl
  misc_feature (12)..(12): 2'-deoxy-2'Fluoro
  misc_feature (13)..(15): 2'-O-methyl
  misc_feature (16)..(19): 2'-deoxy-2'Fluoro
  misc_feature (20)..(21): 2'-O-methyl
cagccgccacauagaucucgg

SEQ ID NO: 2041 - RNA, 19 nt, Artificial Sequence
  Description of Artificial Sequence: Target Sequence/siNA sense region
gcauugagagugaagacca

SEQ ID NO: 2042 - RNA, 19 nt, Artificial Sequence
  Description of Artificial Sequence: Target Sequence/siNA antisense region
uggucuucacucucaaugc

SEQ ID NO: 2043 - DNA, 21 bp, Artificial Sequence
  Description of Artificial Sequence: Target Sequence/siNA sense region (stab00)
  misc_feature (1)..(19): ribonucleotide unmodified or modified as described for this sequence
gcauugagagugaagaccatt

SEQ ID NO: 2044 - DNA, 21 bp, Artificial Sequence
  Description of Artificial Sequence: Target Sequence/siNA antisense region (stab00as)
  misc_feature (1)..(19): ribonucleotide unmodified or modified as described for this sequence
uggucuucacucucaaugctt

SEQ ID NO: 2045 - DNA, 21 bp, Artificial Sequence
  Description of Artificial Sequence: Target Sequence/siNA sense region (stab04)
  misc_feature (1)..(1): 5'-3 attached terminal deoxyabasic moiety, inverted abasic, inverted nucleotide or other terminal cap that is optionally present
  misc_feature (21)..(21): 3'-3 attached terminal deoxyabasic moiety, inverted abasic, inverted nucleotide or other terminal cap that is optionally present
  misc_feature (2)..(2): 2'-deoxy-2'Fluoro
  misc_feature (4)..(5): 2'-deoxy-2'Fluoro
  misc_feature (11)..(11): 2'-deoxy-2'Fluoro
  misc_feature (17)..(18): 2'-deoxy-2'Fluoro
  misc_feature (1)..(19): ribonucleotide unmodified or modified as described for this sequence
gcauugagagugaagaccatt

SEQ ID NO: 2046 - DNA, 21 bp, Artificial Sequence
  Description of Artificial Sequence: Target Sequence/siNA antisense region (stab05)
  misc_feature (1)..(1): 2'-deoxy-2'Fluoro
  misc_feature (4)..(8): 2'-deoxy-2'Fluoro
  misc_feature (10)..(14): 2'-deoxy-2'Fluoro
  misc_feature (17)..(17): 2'-deoxy-2'Fluoro
  misc_feature (19)..(19): 2'-deoxy-2'Fluoro
  misc_feature (20)..(20): Phosphorothioate or Phosphorodithioate 3'-Internucleotide Linkage (optionally present)
  misc_feature (1)..(19): ribonucleotide unmodified or modified as described for this sequence
uggucuucacucucaaugctt

SEQ ID NO: 2047 - DNA, 21 bp, Artificial Sequence
  Description of Artificial Sequence: Target Sequence/siNA sense region (stab07)
  misc_feature (1)..(1): 5'-3 attached terminal deoxyabasic moiety, inverted abasic, inverted nucleotide or other terminal cap that is optionally present
  misc_feature (21)..(21): 3'-3 attached terminal deoxyabasic moiety, inverted abasic, inverted nucleotide or other terminal cap that is optionally present
  misc_feature (2)..(2): 2'-deoxy-2'Fluoro
  misc_feature (4)..(5): 2'-deoxy-2'Fluoro
  misc_feature (11)..(11): 2'-deoxy-2'Fluoro
  misc_feature (17)..(18): 2'-deoxy-2'Fluoro
  misc_feature (1)..(19): ribonucleotide unmodified or modified as described for this sequence
gcauugagagugaagaccatt

SEQ ID NO: 2048 - DNA, 21 bp, Artificial Sequence
  Description of Artificial Sequence: Target Sequence/siNA antisense region (stab08)
  misc_feature (1)..(1): 2'-deoxy-2'Fluoro
  misc_feature (2)..(3): 2'-O-methyl
  misc_feature (4)..(8): 2'-deoxy-2'Fluoro
  misc_feature (9)..(9): 2'-O-methyl
  misc_feature (10)..(14): 2'-deoxy-2'Fluoro
  misc_feature (15)..(16): 2'-O-methyl
  misc_feature (17)..(17): 2'-deoxy-2'Fluoro
  misc_feature (18)..(18): 2'-O-methyl
  misc_feature (19)..(19): 2'-deoxy-2'Fluoro
  misc_feature (20)..(20): Phosphorothioate or Phosphorodithioate 3'-Internucleotide Linkage (optionally present)
  misc_feature (1)..(19): ribonucleotide unmodified or modified as described for this sequence
uggucuucacucucaaugctt

SEQ ID NO: 2049 - DNA, 21 bp, Artificial Sequence
  Description of Artificial Sequence: Target Sequence/siNA sense region (stab09)
  misc_feature (1)..(1): 5'-3 attached terminal deoxyabasic moiety, inverted abasic, inverted nucleotide or other terminal cap that is optionally present
  misc_feature (21)..(21): 3'-3 attached terminal deoxyabasic moiety, inverted abasic, inverted nucleotide or other terminal cap that is optionally present
  misc_feature (1)..(19): ribonucleotide unmodified or modified as described for this sequence
gcauugagagugaagaccatt

SEQ ID NO: 2050 - DNA, 21 bp, Artificial Sequence
  Description of Artificial Sequence: Target Sequence/siNA antisense region (stab10)
  misc_feature (20)..(20): Phosphorothioate or Phosphorodithioate 3'-Internucleotide Linkage (optionally present)
  misc_feature (1)..(19): ribonucleotide unmodified or modified as described for this sequence
uggucuucacucucaaugctt

SEQ ID NO: 2051 - DNA, 21 bp, Artificial Sequence
  Description of Artificial Sequence: Target Sequence/siNA antisense region (stab19)
  misc_feature (21)..(21): 3'-3 attached terminal deoxyabasic moiety, inverted abasic, inverted nucleotide or other terminal cap that is optionally present
  misc_feature (1)..(1): 2'-deoxy-2'Fluoro
  misc_feature (2)..(3): 2'-O-methyl
  misc_feature (4)..(8): 2'-deoxy-2'Fluoro
  misc_feature (9)..(9): 2'-O-methyl
  misc_feature (10)..(14): 2'-deoxy-2'Fluoro
  misc_feature (15)..(16): 2'-O-methyl
  misc_feature (17)..(17): 2'-deoxy-2'Fluoro
  misc_feature (18)..(18): 2'-O-methyl
  misc_feature (19)..(19): 2'-deoxy-2'Fluoro
  misc_feature (1)..(19): ribonucleotide unmodified or modified as described for this sequence
uggucuucacucucaaugctt

SEQ ID NO: 2052 - DNA, 21 bp, Artificial Sequence
  Description of Artificial Sequence: Target Sequence/siNA antisense region (stab22)
  misc_feature (21)..(21): 3'-3 attached terminal deoxyabasic moiety, inverted abasic, inverted nucleotide or other terminal cap that is optionally present
  misc_feature (20)..(20): Phosphorothioate or Phosphorodithioate 3'-Internucleotide Linkage (optionally present)
  misc_feature (1)..(19): ribonucleotide unmodified or modified as described for this sequence
uggucuucacucucaaugctt

SEQ ID NO: 2053 - DNA, 21 bp, Artificial Sequence
  Description of Artificial Sequence: Target Sequence/siNA antisense region (stab25)
  misc_feature (4)..(8): 2'-deoxy-2'Fluoro
  misc_feature (9)..(9): 2'-O-methyl
  misc_feature (10)..(14): 2'-deoxy-2'Fluoro
  misc_feature (15)..(16): 2'-O-methyl
  misc_feature (17)..(17): 2'-deoxy-2'Fluoro
  misc_feature (18)..(18): 2'-O-methyl
  misc_feature (19)..(19): 2'-deoxy-2'Fluoro
  misc_feature (20)..(20): Phosphorothioate or Phosphorodithioate 3'-Internucleotide Linkage (optionally present)
  misc_feature (1)..(19): ribonucleotide unmodified or modified as described for this sequence
uggucuucacucucaaugctt

SEQ ID NO: 2054 - RNA, 21 nt, Artificial Sequence
  Description of Artificial Sequence: Target Sequence/siNA antisense region (stab35)
  misc_feature (4)..(8): 2'-deoxy-2'Fluoro
  misc_feature (9)..(9): 2'-O-methyl
  misc_feature (10)..(14): 2'-deoxy-2'Fluoro
  misc_feature (15)..(16): 2'-O-methyl
  misc_feature (17)..(17): 2'-deoxy-2'Fluoro
  misc_feature (18)..(18): 2'-O-methyl
  misc_feature (19)..(19): 2'-deoxy-2'Fluoro
  misc_feature (20)..(21): 2'-O-methyl
uggucuucacucucaaugcuu

SEQ ID NO: 2055 - RNA, 21 nt, Artificial Sequence
  Description of Artificial Sequence: Target Sequence/siNA antisense region (stab36)
  misc_feature (4)..(8): 2'-deoxy-2'Fluoro
  misc_feature (9)..(9): 2'-O-methyl
  misc_feature (10)..(14): 2'-deoxy-2'Fluoro
  misc_feature (15)..(16): 2'-O-methyl
  misc_feature (17)..(17): 2'-deoxy-2'Fluoro
  misc_feature (18)..(18): 2'-O-methyl
  misc_feature (19)..(19): 2'-deoxy-2'Fluoro
  misc_feature (20)..(21): 2'-O-methyl
uggucuucacucucaaugcag

SEQ ID NO: 2056 - RNA, 19 nt, Artificial Sequence
  Description of Artificial Sequence: Target Sequence/siNA sense region
agucucccacgggccuugc

SEQ ID NO: 2057 - RNA, 19 nt, Artificial Sequence
  Description of Artificial Sequence: Target Sequence/siNA antisense region
gcaaggcccgugggagacu

SEQ ID NO: 2058 - DNA, 21 bp, Artificial Sequence
  Description of Artificial Sequence: Target Sequence/siNA sense region (stab00)
  misc_feature (1)..(19): ribonucleotide unmodified or modified as described for this sequence
agucucccacgggccuugctt

SEQ ID NO: 2059 - DNA, 21 bp, Artificial Sequence
  Description of Artificial Sequence: Target Sequence/siNA antisense region (stab00as)
  misc_feature (1)..(19): ribonucleotide unmodified or modified as described for this sequence
gcaaggcccgugggagacutt

SEQ ID NO: 2060 - DNA, 21 bp, Artificial Sequence
  Description of Artificial Sequence: Target Sequence/siNA sense region (stab04)
  misc_feature (1)..(1): 5'-3 attached terminal deoxyabasic moiety, inverted abasic, inverted nucleotide or other terminal cap that is optionally present
  misc_feature (21)..(21): 3'-3 attached terminal deoxyabasic moiety, inverted abasic, inverted nucleotide or other terminal cap that is optionally present
  misc_feature (3)..(8): 2'-deoxy-2'Fluoro
  misc_feature (10)..(10): 2'-deoxy-2'Fluoro
  misc_feature (14)..(17): 2'-deoxy-2'Fluoro
  misc_feature (19)..(19): 2'-deoxy-2'Fluoro
  misc_feature (1)..(19): ribonucleotide unmodified or modified as described for this sequence
agucucccacgggccuugctt

SEQ ID NO: 2061 - DNA, 21 bp, Artificial Sequence
  Description of Artificial Sequence: Target Sequence/siNA antisense region (stab05)
  misc_feature (2)..(2): 2'-deoxy-2'Fluoro
  misc_feature (7)..(9): 2'-deoxy-2'Fluoro
  misc_feature (11)..(11): 2'-deoxy-2'Fluoro
  misc_feature (18)..(19): 2'-deoxy-2'Fluoro
  misc_feature (20)..(20): Phosphorothioate or Phosphorodithioate 3'-Internucleotide Linkage (optionally present)
  misc_feature (1)..(19): ribonucleotide unmodified or modified as described for this sequence
gcaaggcccgugggagacutt

SEQ ID NO: 2062 - DNA, 21 bp, Artificial Sequence
  Description of Artificial Sequence: Target Sequence/siNA sense region (stab07)
  misc_feature (1)..(1): 5'-3 attached terminal deoxyabasic moiety, inverted abasic, inverted nucleotide or other terminal cap that is optionally present
  misc_feature (21)..(21): 3'-3 attached terminal deoxyabasic moiety, inverted abasic, inverted nucleotide or other terminal cap that is optionally present
  misc_feature (3)..(8): 2'-deoxy-2'Fluoro
  misc_feature (10)..(10): 2'-deoxy-2'Fluoro
  misc_feature (14)..(17): 2'-deoxy-2'Fluoro
  misc_feature (19)..(19): 2'-deoxy-2'Fluoro
  misc_feature (1)..(19): ribonucleotide unmodified or modified as described for this sequence
agucucccacgggccuugctt

SEQ ID NO: 2063 - DNA, 21 bp, Artificial Sequence
  Description of Artificial Sequence: Target Sequence/siNA antisense region (stab08)
  misc_feature (1)..(1): 2'-O-methyl
  misc_feature (2)..(2): 2'-deoxy-2'Fluoro
  misc_feature (3)..(6): 2'-O-methyl
  misc_feature (7)..(9): 2'-deoxy-2'Fluoro
  misc_feature (10)..(10): 2'-O-methyl
  misc_feature (11)..(11): 2'-deoxy-2'Fluoro
  misc_feature (12)..(17): 2'-O-methyl
  misc_feature (18)..(19): 2'-deoxy-2'Fluoro
  misc_feature (20)..(20): Phosphorothioate or Phosphorodithioate 3'-Internucleotide Linkage (optionally present)
  misc_feature (1)..(19): ribonucleotide unmodified or modified as described for this sequence
gcaaggcccgugggagacutt

SEQ ID NO: 2064 - DNA, 21 bp, Artificial Sequence
  Description of Artificial Sequence: Target Sequence/siNA sense region (stab09)
  misc_feature (1)..(1): 5'-3 attached terminal deoxyabasic moiety, inverted abasic, inverted nucleotide or other terminal cap that is optionally present
  misc_feature (21)..(21): 3'-3 attached terminal deoxyabasic moiety, inverted abasic, inverted nucleotide or other terminal cap that is optionally present
  misc_feature (1)..(19): ribonucleotide unmodified or modified as described for this sequence
agucucccacgggccuugctt

SEQ ID NO: 2065 - DNA, 21 bp, Artificial Sequence
  Description of Artificial Sequence: Target Sequence/siNA antisense region (stab10)
  misc_feature (20)..(20): Phosphorothioate or Phosphorodithioate 3'-Internucleotide Linkage (optionally present)
  misc_feature (1)..(19): ribonucleotide unmodified or modified as described for this sequence
gcaaggcccgugggagacutt

SEQ ID NO: 2066 - DNA, 21 bp, Artificial Sequence
  Description of Artificial Sequence: Target Sequence/siNA antisense region (stab19)
  misc_feature (21)..(21): 3'-3 attached terminal deoxyabasic moiety, inverted abasic, inverted nucleotide or other terminal cap that is optionally present
  misc_feature (1)..(1): 2'-O-methyl
  misc_feature (2)..(2): 2'-deoxy-2'Fluoro
  misc_feature (3)..(6): 2'-O-methyl
  misc_feature (7)..(9): 2'-deoxy-2'Fluoro
  misc_feature (10)..(10): 2'-O-methyl
  misc_feature (11)..(11): 2'-deoxy-2'Fluoro
  misc_feature (12)..(17): 2'-O-methyl
  misc_feature (18)..(19): 2'-deoxy-2'Fluoro
  misc_feature (1)..(19): ribonucleotide unmodified or modified as described for this sequence
gcaaggcccgugggagacutt

SEQ ID NO: 2067 - DNA, 21 bp, Artificial Sequence
  Description of Artificial Sequence: Target Sequence/siNA antisense region (stab22)
  misc_feature (21)..(21): 3'-3 attached terminal deoxyabasic moiety, inverted abasic, inverted nucleotide or other terminal cap that is optionally present
  misc_feature (20)..(20): Phosphorothioate or Phosphorodithioate 3'-Internucleotide Linkage (optionally present)
  misc_feature (1)..(19): ribonucleotide unmodified or modified as described for this sequence
gcaaggcccgugggagacutt

SEQ ID NO: 2068 - DNA, 21 bp, Artificial Sequence
  Description of Artificial Sequence: Target Sequence/siNA antisense region (stab25)
  misc_feature (4)..(6): 2'-O-methyl
  misc_feature (7)..(9): 2'-deoxy-2'Fluoro
  misc_feature (10)..(10): 2'-O-methyl
  misc_feature (11)..(11): 2'-deoxy-2'Fluoro
  misc_feature (12)..(17): 2'-O-methyl
  misc_feature (18)..(19): 2'-deoxy-2'Fluoro
  misc_feature (20)..(20): Phosphorothioate or Phosphorodithioate 3'-Internucleotide Linkage (optionally present)
  misc_feature (1)..(19): ribonucleotide unmodified or modified as described for this sequence
gcaaggcccgugggagacutt

SEQ ID NO: 2069 - RNA, 21 nt, Artificial Sequence
  Description of Artificial Sequence: Target Sequence/siNA antisense region (stab35)
  misc_feature (4)..(6): 2'-O-methyl
  misc_feature (7)..(9): 2'-deoxy-2'Fluoro
  misc_feature (10)..(10): 2'-O-methyl
  misc_feature (11)..(11): 2'-deoxy-2'Fluoro
  misc_feature (12)..(17): 2'-O-methyl
  misc_feature (18)..(19): 2'-deoxy-2'Fluoro
  misc_feature (20)..(21): 2'-O-methyl
gcaaggcccgugggagacuuu

SEQ ID NO: 2070 - RNA, 21 nt, Artificial Sequence
  Description of Artificial Sequence: Target Sequence/siNA antisense region (stab36)
  misc_feature (4)..(6): 2'-O-methyl
  misc_feature (7)..(9): 2'-deoxy-2'Fluoro
  misc_feature (10)..(10): 2'-O-methyl
  misc_feature (11)..(11): 2'-deoxy-2'Fluoro
  misc_feature (12)..(17): 2'-O-methyl
  misc_feature (18)..(19): 2'-deoxy-2'Fluoro
  misc_feature (20)..(21): 2'-O-methyl
gcaaggcccgugggagacugg

SEQ ID NO: 2071 - RNA, 19 nt, Artificial Sequence
  Description of Artificial Sequence: Target Sequence/siNA sense region
cauuuucugacacgcuucu

SEQ ID NO: 2072 - RNA, 19 nt, Artificial Sequence
  Description of Artificial Sequence: Target Sequence/siNA antisense region
agaagcgugucagaaaaug

SEQ ID NO: 2073 - DNA, 21 bp, Artificial Sequence
  Description of Artificial Sequence: Target Sequence/siNA sense region (stab00)
  misc_feature (1)..(19): ribonucleotide unmodified or modified as described for this sequence
cauuuucugacacgcuucutt

SEQ ID NO: 2074 - DNA, 21 bp, Artificial Sequence
  Description of Artificial Sequence: Target Sequence/siNA antisense region (stab00as)
  misc_feature (1)..(19): ribonucleotide unmodified or modified as described for this sequence
agaagcgugucagaaaaugtt

SEQ ID NO: 2075 - DNA, 21 bp, Artificial Sequence
  Description of Artificial Sequence: Target Sequence/siNA sense region (stab04)
  misc_feature (1)..(1): 5'-3 attached terminal deoxyabasic moiety, inverted abasic, inverted nucleotide or other terminal cap that is optionally present
  misc_feature (21)..(21): 3'-3 attached terminal deoxyabasic moiety, inverted abasic, inverted nucleotide or other terminal cap that is optionally present
  misc_feature (1)..(1): 2'-deoxy-2'Fluoro
  misc_feature (3)..(8): 2'-deoxy-2'Fluoro
  misc_feature (11)..(11): 2'-deoxy-2'Fluoro
  misc_feature (13)..(13): 2'-deoxy-2'Fluoro
  misc_feature (15)..(19): 2'-deoxy-2'Fluoro
  misc_feature (1)..(19): ribonucleotide unmodified or modified as described for this sequence
cauuuucugacacgcuucutt

SEQ ID NO: 2076 - DNA, 21 bp, Artificial Sequence
  Description of Artificial Sequence: Target Sequence/siNA antisense region (stab05)
  misc_feature (6)..(6): 2'-deoxy-2'Fluoro
  misc_feature (8)..(8): 2'-deoxy-2'Fluoro
  misc_feature (10)..(11): 2'-deoxy-2'Fluoro
  misc_feature (18)..(18): 2'-deoxy-2'Fluoro
  misc_feature (20)..(20): Phosphorothioate or Phosphorodithioate 3'-Internucleotide Linkage (optionally present)
  misc_feature (1)..(19): ribonucleotide unmodified or modified as described for this sequence
agaagcgugucagaaaaugtt

SEQ ID NO: 2077 - DNA, 21 bp, Artificial Sequence
  Description of Artificial Sequence: Target Sequence/siNA sense region (stab07)
  misc_feature (1)..(1): 5'-3 attached terminal deoxyabasic moiety, inverted abasic, inverted nucleotide or other terminal cap that is optionally present
  misc_feature (21)..(21): 3'-3 attached terminal deoxyabasic moiety, inverted abasic, inverted nucleotide or other terminal cap that is optionally present
  misc_feature (1)..(1): 2'-deoxy-2'Fluoro
  misc_feature (3)..(8): 2'-deoxy-2'Fluoro
  misc_feature (11)..(11): 2'-deoxy-2'Fluoro
  misc_feature (13)..(13): 2'-deoxy-2'Fluoro
  misc_feature (15)..(19): 2'-deoxy-2'Fluoro
cauuuucugacacgcuucutt

SEQ ID NO: 2078 - DNA, 21 bp, Artificial Sequence
  Description of Artificial Sequence: Target Sequence/siNA antisense region (stab08)
  misc_feature (1)..(5): 2'-O-methyl
  misc_feature (6)..(6): 2'-deoxy-2'Fluoro
  misc_feature (7)..(7): 2'-O-methyl
  misc_feature (8)..(8): 2'-deoxy-2'Fluoro
  misc_feature (9)..(9): 2'-O-methyl
  misc_feature (10)..(11): 2'-deoxy-2'Fluoro
  misc_feature (12)..(17): 2'-O-methyl
  misc_feature (18)..(18): 2'-deoxy-2'Fluoro
  misc_feature (19)..(19): 2'-O-methyl
  misc_feature (20)..(20): Phosphorothioate or Phosphorodithioate 3'-Internucleotide Linkage (optionally present)
  misc_feature (1)..(19): ribonucleotide unmodified or modified as described for this sequence
agaagcgugucagaaaaugtt

SEQ ID NO: 2079 - DNA, 21 bp, Artificial Sequence
  Description of Artificial Sequence: Target Sequence/siNA sense region (stab09)
  misc_feature (1)..(1): 5'-3 attached terminal deoxyabasic moiety, inverted abasic, inverted nucleotide or other terminal cap that is optionally present
  misc_feature (21)..(21): 3'-3 attached terminal deoxyabasic moiety, inverted abasic, inverted nucleotide or other terminal cap that is optionally present
  misc_feature (1)..(19): ribonucleotide unmodified or modified as described for this sequence
cauuuucugacacgcuucutt

SEQ ID NO: 2080 - DNA, 21 bp, Artificial Sequence
  Description of Artificial Sequence: Target Sequence/siNA antisense region (stab10)
  misc_feature (20)..(20): Phosphorothioate or Phosphorodithioate 3'-Internucleotide Linkage (optionally present)
  misc_feature (1)..(19): ribonucleotide unmodified or modified as described for this sequence
agaagcgugucagaaaaugtt

SEQ ID NO: 2081 - DNA, 21 bp, Artificial Sequence
  Description of Artificial Sequence: Target Sequence/siNA antisense region (stab19)
  misc_feature (21)..(21): 3'-3 attached terminal deoxyabasic moiety, inverted abasic, inverted nucleotide or other terminal cap that is optionally present
  misc_feature (1)..(5): 2'-O-methyl
  misc_feature (6)..(6): 2'-deoxy-2'Fluoro
  misc_feature (7)..(7): 2'-O-methyl
  misc_feature (8)..(8): 2'-deoxy-2'Fluoro
  misc_feature (9)..(9): 2'-O-methyl
  misc_feature (10)..(11): 2'-deoxy-2'Fluoro
  misc_feature (12)..(17): 2'-O-methyl
  misc_feature (18)..(18): 2'-deoxy-2'Fluoro
  misc_feature (19)..(19): 2'-O-methyl
  misc_feature (1)..(19): ribonucleotide unmodified or modified as described for this sequence
agaagcgugucagaaaaugtt

SEQ ID NO: 2082 - DNA, 21 bp, Artificial Sequence
  Description of Artificial Sequence: Target Sequence/siNA antisense region (stab22)
  misc_feature (21)..(21): 3'-3 attached terminal deoxyabasic moiety, inverted abasic, inverted nucleotide or other terminal cap that is optionally present
  misc_feature (20)..(20): Phosphorothioate or Phosphorodithioate 3'-Internucleotide Linkage (optionally present)
  misc_feature (1)..(19): ribonucleotide unmodified or modified as described for this sequence
agaagcgugucagaaaaugtt

SEQ ID NO: 2083 - DNA, 21 bp, Artificial Sequence
  Description of Artificial Sequence: Target Sequence/siNA antisense region (stab25)
  misc_feature (4)..(5): 2'-O-methyl
  misc_feature (6)..(6): 2'-deoxy-2'Fluoro
  misc_feature (7)..(7): 2'-O-methyl
  misc_feature (8)..(8): 2'-deoxy-2'Fluoro
  misc_feature (9)..(9): 2'-O-methyl
  misc_feature (10)..(11): 2'-deoxy-2'Fluoro
  misc_feature (12)..(17): 2'-O-methyl
  misc_feature (18)..(18): 2'-deoxy-2'Fluoro
  misc_feature (19)..(19): 2'-O-methyl
  misc_feature (20)..(20): Phosphorothioate or Phosphorodithioate 3'-Internucleotide Linkage (optionally present)
  misc_feature (1)..(19): ribonucleotide unmodified or modified as described for this sequence
agaagcgugucagaaaaugtt

SEQ ID NO: 2084 - RNA, 21 nt, Artificial Sequence
  Description of Artificial Sequence: Target Sequence/siNA antisense region (stab35)
  misc_feature (4)..(5): 2'-O-methyl
  misc_feature (6)..(6): 2'-deoxy-2'Fluoro
  misc_feature (7)..(7): 2'-O-methyl
  misc_feature (8)..(8): 2'-deoxy-2'Fluoro
  misc_feature (9)..(9): 2'-O-methyl
  misc_feature (10)..(11): 2'-deoxy-2'Fluoro
  misc_feature (12)..(17): 2'-O-methyl
  misc_feature (18)..(18): 2'-deoxy-2'Fluoro
  misc_feature (19)..(21): 2'-O-methyl
agaagcgugucagaaaauguu

SEQ ID NO: 2085 - RNA, 21 nt, Artificial Sequence
  Description of Artificial Sequence: Target Sequence/siNA antisense region (stab36)
  misc_feature (4)..(5): 2'-O-methyl
  misc_feature (6)..(6): 2'-deoxy-2'Fluoro
  misc_feature (7)..(7): 2'-O-methyl
  misc_feature (8)..(8): 2'-deoxy-2'Fluoro
  misc_feature (9)..(9): 2'-O-methyl
  misc_feature (10)..(11): 2'-deoxy-2'Fluoro
  misc_feature (12)..(17): 2'-O-methyl
  misc_feature (18)..(18): 2'-deoxy-2'Fluoro
  misc_feature (19)..(21): 2'-O-methyl
agaagcgugucagaaaaugca

SEQ ID NO: 2086 - RNA, 19 nt, Artificial Sequence
  Description of Artificial Sequence: Target Sequence/siNA sense region
uuccugagcagugcccgcc

SEQ ID NO: 2087 - RNA, 19 nt, Artificial Sequence
  Description of Artificial Sequence: Target Sequence/siNA antisense region
ggcgggcacugcucaggaa

SEQ ID NO: 2088 - DNA, 21 bp, Artificial Sequence
  Description of Artificial Sequence: Target Sequence/siNA sense region (stab00)
  misc_feature (1)..(19): ribonucleotide unmodified or modified as described for this sequence
uuccugagcagugcccgcctt

SEQ ID NO: 2089 - DNA, 21 bp, Artificial Sequence
  Description of Artificial Sequence: Target Sequence/siNA antisense region (stab00as)
  misc_feature (1)..(19): ribonucleotide unmodified or modified as described for this sequence
ggcgggcacugcucaggaatt

SEQ ID NO: 2090 - DNA, 21 bp, Artificial Sequence
  Description of Artificial Sequence: Target Sequence/siNA sense region (stab04)
  misc_feature (1)..(1): 5'-3 attached terminal deoxyabasic moiety, inverted abasic, inverted nucleotide or other terminal cap that is optionally present
  misc_feature (21)..(21): 3'-3 attached terminal deoxyabasic moiety, inverted abasic, inverted nucleotide or other terminal cap that is optionally present
  misc_feature (1)..(5): 2'-deoxy-2'Fluoro
  misc_feature (9)..(9): 2'-deoxy-2'Fluoro
  misc_feature (12)..(12): 2'-deoxy-2'Fluoro
  misc_feature (14)..(16): 2'-deoxy-2'Fluoro
  misc_feature (18)..(19): 2'-deoxy-2'Fluoro
  misc_feature (1)..(19): ribonucleotide unmodified or modified as described for this sequence
uuccugagcagugcccgcctt

SEQ ID NO: 2091 - DNA, 21 bp, Artificial Sequence
  Description of Artificial Sequence: Target Sequence/siNA antisense region (stab05)
  misc_feature (3)..(3): 2'-deoxy-2'Fluoro
  misc_feature (7)..(7): 2'-deoxy-2'Fluoro
  misc_feature (9)..(10): 2'-deoxy-2'Fluoro
  misc_feature (12)..(14): 2'-deoxy-2'Fluoro
  misc_feature (20)..(20): Phosphorothioate or Phosphorodithioate 3'-Internucleotide Linkage (optionally present)
  misc_feature (1)..(19): ribonucleotide unmodified or modified as described for this sequence
ggcgggcacugcucaggaatt

SEQ ID NO: 2092 - DNA, 21 bp, Artificial Sequence
  Description of Artificial Sequence: Target Sequence/siNA sense region (stab07)
  misc_feature (1)..(1): 5'-3 attached terminal deoxyabasic moiety, inverted abasic, inverted nucleotide or other terminal cap that is optionally present
  misc_feature (21)..(21): 3'-3 attached terminal deoxyabasic moiety, inverted abasic, inverted nucleotide or other terminal cap that is optionally present
  misc_feature (1)..(5): 2'-deoxy-2'Fluoro
  misc_feature (9)..(9): 2'-deoxy-2'Fluoro
  misc_feature (12)..(12): 2'-deoxy-2'Fluoro
  misc_feature (14)..(16): 2'-deoxy-2'Fluoro
  misc_feature (18)..(19): 2'-deoxy-2'Fluoro
  misc_feature (1)..(19): ribonucleotide unmodified or modified as described for this sequence
uuccugagcagugcccgcctt

SEQ ID NO: 2093 - DNA, 21 bp, Artificial Sequence
  Description of Artificial Sequence: Target Sequence/siNA antisense region (stab08)
  misc_feature (1)..(2): 2'-O-methyl
  misc_feature (3)..(3): 2'-deoxy-2'Fluoro
  misc_feature (4)..(6): 2'-O-methyl
  misc_feature (7)..(7): 2'-deoxy-2'Fluoro
  misc_feature (8)..(8): 2'-O-methyl
  misc_feature (9)..(10): 2'-deoxy-2'Fluoro
  misc_feature (11)..(11): 2'-O-methyl
  misc_feature (12)..(14): 2'-deoxy-2'Fluoro
  misc_feature (15)..(19): 2'-O-methyl
  misc_feature (20)..(20): Phosphorothioate or Phosphorodithioate 3'-Internucleotide Linkage (optionally present)
  misc_feature (1)..(19): ribonucleotide unmodified or modified as described for this sequence
ggcgggcacugcucaggaatt

SEQ ID NO: 2094 - DNA, 21 bp, Artificial Sequence
  Description of Artificial Sequence: Target Sequence/siNA sense region (stab09)
  misc_feature (1)..(1): 5'-3 attached terminal deoxyabasic moiety, inverted abasic, inverted nucleotide or other terminal cap that is optionally present
  misc_feature (21)..(21): 3'-3 attached terminal deoxyabasic moiety, inverted abasic, inverted nucleotide or other terminal cap that is optionally present
  misc_feature (1)..(19): ribonucleotide unmodified or modified as described for this sequence
uuccugagcagugcccgcctt

SEQ ID NO: 2095 - DNA, 21 bp, Artificial Sequence
  Description of Artificial Sequence: Target Sequence/siNA antisense region (stab10)
  misc_feature (20)..(20): Phosphorothioate or Phosphorodithioate 3'-Internucleotide Linkage (optionally present)
  misc_feature (1)..(19): ribonucleotide unmodified or modified as described for this sequence
ggcgggcacugcucaggaatt

SEQ ID NO: 2096 - DNA, 21 bp, Artificial Sequence
  Description of Artificial Sequence: Target Sequence/siNA antisense region (stab19)
  misc_feature (21)..(21): 3'-3 attached terminal deoxyabasic moiety, inverted abasic, inverted nucleotide or other terminal cap that is optionally present
  misc_feature (1)..(2): 2'-O-methyl
  misc_feature (3)..(3): 2'-deoxy-2'Fluoro
  misc_feature (4)..(6): 2'-O-methyl
  misc_feature (7)..(7): 2'-deoxy-2'Fluoro
  misc_feature (8)..(8): 2'-O-methyl
  misc_feature (9)..(10): 2'-deoxy-2'Fluoro
  misc_feature (11)..(11): 2'-O-methyl
  misc_feature (12)..(14): 2'-deoxy-2'Fluoro
  misc_feature (15)..(19): 2'-O-methyl
  misc_feature (1)..(19): ribonucleotide unmodified or modified as described for this sequence
ggcgggcacugcucaggaatt

SEQ ID NO: 2097 - DNA, 21 bp, Artificial Sequence
  Description of Artificial Sequence: Target Sequence/siNA antisense region (stab22)
  misc_feature (21)..(21): 3'-3 attached terminal deoxyabasic moiety, inverted abasic, inverted nucleotide or other terminal cap that is optionally present
  misc_feature (20)..(20): Phosphorothioate or Phosphorodithioate 3'-Internucleotide Linkage (optionally present)
  misc_feature (1)..(19): ribonucleotide unmodified or modified as described for this sequence
ggcgggcacugcucaggaatt

SEQ ID NO: 2098 - DNA, 21 bp, Artificial Sequence
  Description of Artificial Sequence: Target Sequence/siNA antisense region (stab25)
  misc_feature (4)..(6): 2'-O-methyl
  misc_feature (7)..(7): 2'-deoxy-2'Fluoro
  misc_feature (8)..(8): 2'-O-methyl
  misc_feature (9)..(10): 2'-deoxy-2'Fluoro
  misc_feature (11)..(11): 2'-O-methyl
  misc_feature (12)..(14): 2'-deoxy-2'Fluoro
  misc_feature (15)..(19): 2'-O-methyl
  misc_feature (20)..(20): Phosphorothioate or Phosphorodithioate 3'-Internucleotide Linkage (optionally present)
  misc_feature (1)..(19): ribonucleotide unmodified or modified as described for this sequence
ggcgggcacugcucaggaatt

SEQ ID NO: 2099 - RNA, 21 nt, Artificial Sequence
  Description of Artificial Sequence: Target Sequence/siNA antisense region (stab35)
  misc_feature (4)..(6): 2'-O-methyl
  misc_feature (7)..(7): 2'-deoxy-2'Fluoro
  misc_feature (8)..(8): 2'-O-methyl
  misc_feature (9)..(10): 2'-deoxy-2'Fluoro
  misc_feature (11)..(11): 2'-O-methyl
  misc_feature (12)..(14): 2'-deoxy-2'Fluoro
  misc_feature (15)..(21): 2'-O-methyl
ggcgggcacugcucaggaauu

SEQ ID NO: 2100 - RNA, 21 nt, Artificial Sequence
  Description of Artificial Sequence: Target Sequence/siNA antisense region (stab36)
  misc_feature (4)..(6): 2'-O-methyl
  misc_feature (7)..(7): 2'-deoxy-2'Fluoro
  misc_feature (8)..(8): 2'-O-methyl
  misc_feature (9)..(10): 2'-deoxy-2'Fluoro
  misc_feature (11)..(11): 2'-O-methyl
  misc_feature (12)..(14): 2'-deoxy-2'Fluoro
  misc_feature (15)..(21): 2'-O-methyl
ggcgggcacugcucaggaaga

SEQ ID NO: 2101 - RNA, 19 nt, Artificial Sequence
  Description of Artificial Sequence: Target Sequence/siNA sense region
caggccugccuggcacaga

SEQ ID NO: 2102 - RNA, 19 nt, Artificial Sequence
  Description of Artificial Sequence: Target Sequence/siNA antisense region
ucugugccaggcaggccug

SEQ ID NO: 2103 - DNA, 21 bp, Artificial Sequence
  Description of Artificial Sequence: Target Sequence/siNA sense region (stab00)
  misc_feature (1)..(19): ribonucleotide unmodified or modified as described for this sequence
caggccugccuggcacagatt

SEQ ID NO: 2104 - DNA, 21 bp, Artificial Sequence
  Description of Artificial Sequence: Target Sequence/siNA antisense region (stab00as)
  misc_feature (1)..(19): ribonucleotide unmodified or modified as described for this sequence
ucugugccaggcaggccugtt

SEQ ID NO: 2105 - DNA, 21 bp, Artificial Sequence
  Description of Artificial Sequence: Target Sequence/siNA sense region (stab04)
  misc_feature (1)..(1): 5'-3 attached terminal deoxyabasic moiety, inverted abasic, inverted nucleotide or other terminal cap that is optionally present
  misc_feature (21)..(21): 3'-3 attached terminal deoxyabasic moiety, inverted abasic, inverted nucleotide or other terminal cap that is optionally present
  misc_feature (1)..(1): 2'-deoxy-2'Fluoro
  misc_feature (5)..(7): 2'-deoxy-2'Fluoro
  misc_feature (9)..(11): 2'-deoxy-2'Fluoro
  misc_feature (14)..(14): 2'-deoxy-2'Fluoro
  misc_feature (16)..(16): 2'-deoxy-2'Fluoro
  misc_feature (1)..(19): ribonucleotide unmodified or modified as described for this sequence
caggccugccuggcacagatt

SEQ ID NO: 2106 - DNA, 21 bp, Artificial Sequence
  Description of Artificial Sequence: Target Sequence/siNA antisense region (stab05)
  misc_feature (1)..(3): 2'-deoxy-2'Fluoro
  misc_feature (5)..(5): 2'-deoxy-2'Fluoro
  misc_feature (7)..(8): 2'-deoxy-2'Fluoro
  misc_feature (12)..(12): 2'-deoxy-2'Fluoro
  misc_feature (16)..(18): 2'-deoxy-2'Fluoro
  misc_feature (20)..(20): Phosphorothioate or Phosphorodithioate 3'-Internucleotide Linkage (optionally present)
  misc_feature (1)..(19): ribonucleotide unmodified or modified as described for this sequence
ucugugccaggcaggccugtt

SEQ ID NO: 2107 - DNA, 21 bp, Artificial Sequence
  Description of Artificial Sequence: Target Sequence/siNA sense region (stab07)
  misc_feature (1)..(1): 5'-3 attached terminal deoxyabasic moiety, inverted abasic, inverted nucleotide or other terminal cap that is optionally present
  misc_feature (21)..(21): 3'-3 attached terminal deoxyabasic moiety, inverted abasic, inverted nucleotide or other terminal cap that is optionally present
  misc_feature (1)..(1): 2'-deoxy-2'Fluoro
  misc_feature (5)..(7): 2'-deoxy-2'Fluoro
  misc_feature (9)..(11): 2'-deoxy-2'Fluoro
  misc_feature (14)..(14): 2'-deoxy-2'Fluoro
  misc_feature (16)..(16): 2'-deoxy-2'Fluoro
  misc_feature (1)..(19): ribonucleotide unmodified or modified as described for this sequence
caggccugccuggcacagatt

SEQ ID NO: 2108 - DNA, 21 bp, Artificial Sequence
  Description of Artificial Sequence: Target Sequence/siNA antisense region (stab08)
  misc_feature (1)..(3): 2'-deoxy-2'Fluoro
  misc_feature (4)..(4): 2'-O-methyl
  misc_feature (5)..(5): 2'-deoxy-2'Fluoro
  misc_feature (6)..(6): 2'-O-methyl
  misc_feature (7)..(8): 2'-deoxy-2'Fluoro
  misc_feature (9)..(11): 2'-O-methyl
  misc_feature (12)..(12): 2'-deoxy-2'Fluoro
  misc_feature (13)..(15): 2'-O-methyl
  misc_feature (16)..(18): 2'-deoxy-2'Fluoro
  misc_feature (19)..(19): 2'-O-methyl
  misc_feature (20)..(20): Phosphorothioate or Phosphorodithioate 3'-Internucleotide Linkage (optionally present)
  misc_feature (1)..(19): ribonucleotide unmodified or modified as described for this sequence
ucugugccaggcaggccugtt

SEQ ID NO: 2109 - DNA, 21 bp, Artificial Sequence
  Description of Artificial Sequence: Target Sequence/siNA sense region (stab09)
  misc_feature (1)..(1): 5'-3 attached terminal deoxyabasic moiety, inverted abasic, inverted nucleotide or other terminal cap that is optionally present
  misc_feature (21)..(21): 3'-3 attached terminal deoxyabasic moiety, inverted abasic, inverted nucleotide or other terminal cap that is optionally present
  misc_feature (1)..(19): ribonucleotide unmodified or modified as described for this sequence
caggccugccuggcacagatt

SEQ ID NO: 2110 - DNA, 21 bp, Artificial Sequence
  Description of Artificial Sequence: Target Sequence/siNA antisense region (stab10)
  misc_feature (20)..(20): Phosphorothioate or Phosphorodithioate 3'-Internucleotide Linkage (optionally present)
  misc_feature (1)..(19): ribonucleotide unmodified or modified as described for this sequence
ucugugccaggcaggccugtt

SEQ ID NO: 2111 - DNA, 21 bp, Artificial Sequence
  Description of Artificial Sequence: Target Sequence/siNA antisense region (stab19)
  misc_feature (21)..(21): 3'-3 attached terminal deoxyabasic moiety, inverted abasic, inverted nucleotide or other terminal cap that is optionally present
  misc_feature (1)..(3): 2'-deoxy-2'Fluoro
  misc_feature (4)..(4): 2'-O-methyl
  misc_feature (5)..(5): 2'-deoxy-2'Fluoro
  misc_feature (6)..(6): 2'-O-methyl
  misc_feature (7)..(8): 2'-deoxy-2'Fluoro
  misc_feature (9)..(11): 2'-O-methyl
  misc_feature (12)..(12): 2'-deoxy-2'Fluoro
  misc_feature (13)..(15): 2'-O-methyl
  misc_feature (16)..(18): 2'-deoxy-2'Fluoro
  misc_feature (19)..(19): 2'-O-methyl
  misc_feature (1)..(19): ribonucleotide unmodified or modified as described for this sequence
ucugugccaggcaggccugtt

SEQ ID NO: 2112 - DNA, 21 bp, Artificial Sequence
  Description of Artificial Sequence: Target Sequence/siNA antisense region (stab22)
  misc_feature (21)..(21): 3'-3 attached terminal deoxyabasic moiety, inverted abasic, inverted nucleotide or other terminal cap that is optionally present
  misc_feature (20)..(20): Phosphorothioate or Phosphorodithioate 3'-Internucleotide Linkage (optionally present)
  misc_feature (1)..(19): ribonucleotide unmodified or modified as described for this sequence
ucugugccaggcaggccugtt

SEQ ID NO: 2113 - DNA, 21 bp, Artificial Sequence
  Description of Artificial Sequence: Target Sequence/siNA antisense region (stab25)
  misc_feature (4)..(4): 2'-O-methyl
  misc_feature (5)..(5): 2'-deoxy-2'Fluoro
  misc_feature (6)..(6): 2'-O-methyl
  misc_feature (7)..(8): 2'-deoxy-2'Fluoro
  misc_feature (9)..(11): 2'-O-methyl
  misc_feature (12)..(12): 2'-deoxy-2'Fluoro
  misc_feature (13)..(15): 2'-O-methyl
  misc_feature (16)..(18): 2'-deoxy-2'Fluoro
  misc_feature (19)..(19): 2'-O-methyl
  misc_feature (20)..(20): Phosphorothioate or Phosphorodithioate 3'-Internucleotide Linkage (optionally present)
  misc_feature (1)..(19): ribonucleotide unmodified or modified as described for this sequence
ucugugccaggcaggccugtt

SEQ ID NO: 2114 - RNA, 21 nt, Artificial Sequence
  Description of Artificial Sequence: Target Sequence/siNA antisense region (stab35)
  misc_feature (4)..(4): 2'-O-methyl
  misc_feature (5)..(5): 2'-deoxy-2'Fluoro
  misc_feature (6)..(6): 2'-O-methyl
  misc_feature (7)..(8): 2'-deoxy-2'Fluoro
  misc_feature (9)..(11): 2'-O-methyl
  misc_feature (12)..(12): 2'-deoxy-2'Fluoro
  misc_feature (13)..(15): 2'-O-methyl
  misc_feature (16)..(18): 2'-deoxy-2'Fluoro
  misc_feature (19)..(21): 2'-O-methyl
ucugugccaggcaggccuguu

SEQ ID NO: 2115 - RNA, 21 nt, Artificial Sequence
  Description of Artificial Sequence: Target Sequence/siNA antisense region (stab36)
  misc_feature (4)..(4): 2'-O-methyl
  misc_feature (5)..(5): 2'-deoxy-2'Fluoro
  misc_feature (6)..(6): 2'-O-methyl
  misc_feature (7)..(8): 2'-deoxy-2'Fluoro
  misc_feature (9)..(11): 2'-O-methyl
  misc_feature (12)..(12): 2'-deoxy-2'Fluoro
  misc_feature (13)..(15): 2'-O-methyl
  misc_feature (16)..(18): 2'-deoxy-2'Fluoro
  misc_feature (19)..(21): 2'-O-methyl
ucugugccaggcaggccuggc

SEQ ID NO: 2116 - RNA, 19 nt, Artificial Sequence
  Description of Artificial Sequence: Target Sequence/siNA sense region
aguggcucagugccuccug

SEQ ID NO: 2117 - RNA, 19 nt, Artificial Sequence
  Description of Artificial Sequence: Target Sequence/siNA antisense region
caggaggcacugagccacu

SEQ ID NO: 2118 - DNA, 21 bp, Artificial Sequence
  Description of Artificial Sequence: Target Sequence/siNA sense region (stab00)
  misc_feature (1)..(19): ribonucleotide unmodified or modified as described for this sequence
aguggcucagugccuccugtt

SEQ ID NO: 2119 - DNA, 21 bp, Artificial Sequence
  Description of Artificial Sequence: Target Sequence/siNA antisense region (stab00as)
  misc_feature (1)..(19): ribonucleotide unmodified or modified as described for this sequence
caggaggcacugagccacutt

SEQ ID NO: 2120 - DNA, 21 bp, Artificial Sequence
  Description of Artificial Sequence: Target Sequence/siNA sense region (stab04)
  misc_feature (1)..(1): 5'-3 attached terminal deoxyabasic moiety, inverted abasic, inverted nucleotide or other terminal cap that is optionally present
  misc_feature (21)..(21): 3'-3 attached terminal deoxyabasic moiety, inverted abasic, inverted nucleotide or other terminal cap that is optionally present
  misc_feature (3)..(3): 2'-deoxy-2'Fluoro
  misc_feature (6)..(8): 2'-deoxy-2'Fluoro
  misc_feature (11)..(11): 2'-deoxy-2'Fluoro
  misc_feature (13)..(18): 2'-deoxy-2'Fluoro
  misc_feature (1)..(19): ribonucleotide unmodified or modified as described for this sequence
aguggcucagugccuccugtt

SEQ ID NO: 2121 - DNA, 21 bp, Artificial Sequence
  Description of Artificial Sequence: Target Sequence/siNA antisense region (stab05)
  misc_feature (1)..(1): 2'-deoxy-2'Fluoro
  misc_feature (8)..(8): 2'-deoxy-2'Fluoro
  misc_feature (10)..(11): 2'-deoxy-2'Fluoro
  misc_feature (15)..(16): 2'-deoxy-2'Fluoro
  misc_feature (18)..(19): 2'-deoxy-2'Fluoro
  misc_feature (20)..(20): Phosphorothioate or Phosphorodithioate 3'-Internucleotide Linkage (optionally present)
  misc_feature (1)..(19): ribonucleotide unmodified or modified as described for this sequence
caggaggcacugagccacutt

SEQ ID NO: 2122 - DNA, 21 bp, Artificial Sequence
  Description of Artificial Sequence: Target Sequence/siNA sense region (stab07)
  misc_feature (1)..(1): 5'-3 attached terminal deoxyabasic moiety, inverted abasic, inverted nucleotide or other terminal cap that is optionally present
  misc_feature (21)..(21): 3'-3 attached terminal deoxyabasic moiety, inverted abasic, inverted nucleotide or other terminal cap that is optionally present
  misc_feature (3)..(3): 2'-deoxy-2'Fluoro
  misc_feature (6)..(8): 2'-deoxy-2'Fluoro
  misc_feature (11)..(11): 2'-deoxy-2'Fluoro
  misc_feature (13)..(18): 2'-deoxy-2'Fluoro
  misc_feature (1)..(19): ribonucleotide unmodified or modified as described for this sequence
aguggcucagugccuccugtt

SEQ ID NO: 2123 - DNA, 21 bp, Artificial Sequence
  Description of Artificial Sequence: Target Sequence/siNA antisense region (stab08)
  misc_feature (1)..(1): 2'-deoxy-2'Fluoro
  misc_feature (2)..(7): 2'-O-methyl
  misc_feature (8)..(8): 2'-deoxy-2'Fluoro
  misc_feature (9)..(9): 2'-O-methyl
  misc_feature (10)..(11): 2'-deoxy-2'Fluoro
  misc_feature (12)..(14): 2'-O-methyl
  misc_feature (15)..(16): 2'-deoxy-2'Fluoro
  misc_feature (17)..(17): 2'-O-methyl
  misc_feature (18)..(19): 2'-deoxy-2'Fluoro
  misc_feature (20)..(20): Phosphorothioate or Phosphorodithioate 3'-Internucleotide Linkage (optionally present)
  misc_feature (1)..(19): ribonucleotide unmodified or modified as described for this sequence
caggaggcacugagccacutt

SEQ ID NO: 2124 - DNA, 21 bp, Artificial Sequence
  Description of Artificial Sequence: Target Sequence/siNA sense region (stab09)
  misc_feature (1)..(1): 5'-3 attached terminal deoxyabasic moiety, inverted abasic, inverted nucleotide or other terminal cap that is optionally present
  misc_feature (21)..(21): 3'-3 attached terminal deoxyabasic moiety, inverted abasic, inverted nucleotide or other terminal cap that is optionally present
  misc_feature (1)..(19): ribonucleotide unmodified or modified as described for this sequence
aguggcucagugccuccugtt

SEQ ID NO: 2125 - DNA, 21 bp, Artificial Sequence
  Description of Artificial Sequence: Target Sequence/siNA antisense region (stab10)
  misc_feature (20)..(20): Phosphorothioate or Phosphorodithioate 3'-Internucleotide Linkage (optionally present)
  misc_feature (1)..(19): ribonucleotide unmodified or modified as described for this sequence
caggaggcacugagccacutt

SEQ ID NO: 2126 - DNA, 21 bp, Artificial Sequence
  Description of Artificial Sequence: Target Sequence/siNA antisense region (stab19)
  misc_feature (21)..(21): 3'-3 attached terminal deoxyabasic moiety, inverted abasic, inverted nucleotide or other terminal cap that is optionally present
  misc_feature (1)..(1): 2'-deoxy-2'Fluoro
  misc_feature (2)..(7): 2'-O-methyl
  misc_feature (8)..(8): 2'-deoxy-2'Fluoro
  misc_feature (9)..(9): 2'-O-methyl
  misc_feature (10)..(11): 2'-deoxy-2'Fluoro
  misc_feature (12)..(14): 2'-O-methyl
  misc_feature (15)..(16): 2'-deoxy-2'Fluoro
  misc_feature (17)..(17): 2'-O-methyl
  misc_feature (18)..(19): 2'-deoxy-2'Fluoro
  misc_feature (1)..(19): ribonucleotide unmodified or modified as described for this sequence
caggaggcacugagccacutt

SEQ ID NO: 2127 - DNA, 21 bp, Artificial Sequence
  Description of Artificial Sequence: Target Sequence/siNA antisense region (stab22)
  misc_feature (21)..(21): 3'-3 attached terminal deoxyabasic moiety, inverted abasic, inverted nucleotide or other terminal cap that is optionally present
  misc_feature (20)..(20): Phosphorothioate or Phosphorodithioate 3'-Internucleotide Linkage (optionally present)
  misc_feature (1)..(19): ribonucleotide unmodified or modified as described for this sequence
caggaggcacugagccacutt

SEQ ID NO: 2128 - DNA, 21 bp, Artificial Sequence
  Description of Artificial Sequence: Target Sequence/siNA antisense region (stab25)
  misc_feature (4)..(7): 2'-O-methyl
  misc_feature (8)..(8): 2'-deoxy-2'Fluoro
  misc_feature (9)..(9): 2'-O-methyl
  misc_feature (10)..(11): 2'-deoxy-2'Fluoro
  misc_feature (12)..(14): 2'-O-methyl
  misc_feature (15)..(16): 2'-deoxy-2'Fluoro
  misc_feature (17)..(17): 2'-O-methyl
  misc_feature (18)..(19): 2'-deoxy-2'Fluoro
  misc_feature (20)..(20): Phosphorothioate or Phosphorodithioate 3'-Internucleotide Linkage (optionally present)
  misc_feature (1)..(19): ribonucleotide unmodified or modified as described for this sequence
caggaggcacugagccacutt

SEQ ID NO: 2129 - RNA, 21 nt, Artificial Sequence
  Description of Artificial Sequence: Target Sequence/siNA antisense region (stab35)
  misc_feature (4)..(7): 2'-O-methyl
  misc_feature (8)..(8): 2'-deoxy-2'Fluoro
  misc_feature (9)..(9): 2'-O-methyl
  misc_feature (10)..(11): 2'-deoxy-2'Fluoro
  misc_feature (12)..(14): 2'-O-methyl
  misc_feature (15)..(16): 2'-deoxy-2'Fluoro
  misc_feature (17)..(17): 2'-O-methyl
  misc_feature (18)..(19): 2'-deoxy-2'Fluoro
  misc_feature (20)..(21): 2'-O-methyl
caggaggcacugagccacuuu

SEQ ID NO: 2130 - RNA, 21 nt, Artificial Sequence
  Description of Artificial Sequence: Target Sequence/siNA antisense region (stab36)
  misc_feature (4)..(7): 2'-O-methyl
  misc_feature (8)..(8): 2'-deoxy-2'Fluoro
  misc_feature (9)..(9): 2'-O-methyl
  misc_feature (10)..(11): 2'-deoxy-2'Fluoro
  misc_feature (12)..(14): 2'-O-methyl
  misc_feature (15)..(16): 2'-deoxy-2'Fluoro
  misc_feature (17)..(17): 2'-O-methyl
  misc_feature (18)..(19): 2'-deoxy-2'Fluoro
  misc_feature (20)..(21): 2'-O-methyl
caggaggcacugagccacucu

SEQ ID NO: 2131 - RNA, 19 nt, Artificial Sequence
  Description of Artificial Sequence: Target Sequence/siNA sense region
gccaugcaguggcucugcc

SEQ ID NO: 2132 - RNA, 19 nt, Artificial Sequence
  Description of Artificial Sequence: Target Sequence/siNA antisense region
ggcagagccacugcauggc

SEQ ID NO: 2133 - DNA, 21 bp, Artificial Sequence
  Description of Artificial Sequence: Target Sequence/siNA sense region (stab00)
  misc_feature (1)..(19): ribonucleotide unmodified or modified as described for this sequence
gccaugcaguggcucugcctt

SEQ ID NO: 2134 - DNA, 21 bp, Artificial Sequence
  Description of Artificial Sequence: Target Sequence/siNA antisense region (stab00as)
  misc_feature (1)..(19): ribonucleotide unmodified or modified as described for this sequence
ggcagagccacugcauggctt

SEQ ID NO: 2135 - DNA, 21 bp, Artificial Sequence
  Description of Artificial Sequence: Target Sequence/siNA sense region (stab04)
  misc_feature (1)..(1): 5'-3 attached terminal deoxyabasic moiety, inverted abasic, inverted nucleotide or other terminal cap that is optionally present
  misc_feature (21)..(21): 3'-3 attached terminal deoxyabasic moiety, inverted abasic, inverted nucleotide or other terminal cap that is optionally present
  misc_feature (2)..(3): 2'-deoxy-2'Fluoro
  misc_feature (5)..(5): 2'-deoxy-2'Fluoro
  misc_feature (7)..(7): 2'-deoxy-2'Fluoro
  misc_feature (10)..(10): 2'-deoxy-2'Fluoro
  misc_feature (13)..(16): 2'-deoxy-2'Fluoro
  misc_feature (18)..(19): 2'-deoxy-2'Fluoro
  misc_feature (1)..(19): ribonucleotide unmodified or modified as described for this sequence
gccaugcaguggcucugcctt

SEQ ID NO: 2136 - DNA, 21 bp, Artificial Sequence
  Description of Artificial Sequence: Target Sequence/siNA antisense region (stab05)
  misc_feature (3)..(3): 2'-deoxy-2'Fluoro
  misc_feature (8)..(9): 2'-deoxy-2'Fluoro
  misc_feature (11)..(12): 2'-deoxy-2'Fluoro
  misc_feature (14)..(14): 2'-deoxy-2'Fluoro
  misc_feature (16)..(16): 2'-deoxy-2'Fluoro
  misc_feature (19)..(19): 2'-deoxy-2'Fluoro
  misc_feature (20)..(20): Phosphorothioate or Phosphorodithioate 3'-Internucleotide Linkage (optionally present)
  misc_feature (1)..(19): ribonucleotide unmodified or modified as described for this sequence
ggcagagccacugcauggctt

SEQ ID NO: 2137 - DNA, 21 bp, Artificial Sequence
  Description of Artificial Sequence: Target Sequence/siNA sense region (stab07)
  misc_feature (1)..(1): 5'-3 attached terminal deoxyabasic moiety, inverted abasic, inverted nucleotide or other terminal cap that is optionally present
  misc_feature (21)..(21): 3'-3 attached terminal deoxyabasic moiety, inverted abasic, inverted nucleotide or other terminal cap that is optionally present
  misc_feature (2)..(3): 2'-deoxy-2'Fluoro
  misc_feature (5)..(5): 2'-deoxy-2'Fluoro
  misc_feature (7)..(7): 2'-deoxy-2'Fluoro
  misc_feature (10)..(10): 2'-deoxy-2'Fluoro
  misc_feature (13)..(16): 2'-deoxy-2'Fluoro
  misc_feature (18)..(19): 2'-deoxy-2'Fluoro
  misc_feature (1)..(19): ribonucleotide unmodified or modified as described for this sequence
gccaugcaguggcucugcctt

SEQ ID NO: 2138 - DNA, 21 bp, Artificial Sequence
  Description of Artificial Sequence: Target Sequence/siNA antisense region (stab08)
  misc_feature (1)..(2): 2'-O-methyl
  misc_feature (3)..(3): 2'-deoxy-2'Fluoro
  misc_feature (4)..(7): 2'-O-methyl
  misc_feature (8)..(9): 2'-deoxy-2'Fluoro
  misc_feature (10)..(10): 2'-O-methyl
  misc_feature (11)..(12): 2'-deoxy-2'Fluoro
  misc_feature (13)..(13): 2'-O-methyl
  misc_feature (14)..(14): 2'-deoxy-2'Fluoro
  misc_feature (15)..(15): 2'-O-methyl
  misc_feature (16)..(16): 2'-deoxy-2'Fluoro
  misc_feature (17)..(18): 2'-O-methyl
  misc_feature (19)..(19): 2'-deoxy-2'Fluoro
  misc_feature (20)..(20): Phosphorothioate or Phosphorodithioate 3'-Internucleotide Linkage (optionally present)
  misc_feature (1)..(19): ribonucleotide unmodified or modified as described for this sequence
ggcagagccacugcauggctt

SEQ ID NO: 2139 - DNA, 21 bp, Artificial Sequence
  Description of Artificial Sequence: Target Sequence/siNA sense region (stab09)
  misc_feature (1)..(1): 5'-3 attached terminal deoxyabasic moiety, inverted abasic, inverted nucleotide or other terminal cap that is optionally present
  misc_feature (21)..(21): 3'-3 attached terminal deoxyabasic moiety, inverted abasic, inverted nucleotide or other terminal cap that is optionally present
  misc_feature (1)..(19): ribonucleotide unmodified or modified as described for this sequence
gccaugcaguggcucugcctt

SEQ ID NO: 2140 - DNA, 21 bp, Artificial Sequence
  Description of Artificial Sequence: Target Sequence/siNA antisense region (stab10)
  misc_feature (20)..(20): Phosphorothioate or Phosphorodithioate 3'-Internucleotide Linkage (optionally present)
  misc_feature (1)..(19): ribonucleotide unmodified or modified as described for this sequence
ggcagagccacugcauggctt

SEQ ID NO: 2141 - DNA, 21 bp, Artificial Sequence
  Description of Artificial Sequence: Target Sequence/siNA antisense region (stab19)
  misc_feature (21)..(21): 3'-3 attached terminal deoxyabasic moiety, inverted abasic, inverted nucleotide or other terminal cap that is optionally present
  misc_feature (1)..(2): 2'-O-methyl
  misc_feature (3)..(3): 2'-deoxy-2'Fluoro
  misc_feature (4)..(7): 2'-O-methyl
  misc_feature (8)..(9): 2'-deoxy-2'Fluoro
  misc_feature (10)..(10): 2'-O-methyl
  misc_feature (11)..(12): 2'-deoxy-2'Fluoro
  misc_feature (13)..(13): 2'-O-methyl
  misc_feature (14)..(14): 2'-deoxy-2'Fluoro
  misc_feature (15)..(15): 2'-O-methyl
  misc_feature (16)..(16): 2'-deoxy-2'Fluoro
  misc_feature (17)..(18): 2'-O-methyl
  misc_feature (19)..(19): 2'-deoxy-2'Fluoro
  misc_feature (1)..(19): ribonucleotide unmodified or modified as described for this sequence
ggcagagccacugcauggctt

SEQ ID NO: 2142 - DNA, 21 bp, Artificial Sequence
  Description of Artificial Sequence: Target Sequence/siNA antisense region (stab22)
  misc_feature (21)..(21): 3'-3 attached terminal deoxyabasic moiety, inverted abasic, inverted nucleotide or other terminal cap that is optionally present
  misc_feature (20)..(20): Phosphorothioate or Phosphorodithioate 3'-Internucleotide Linkage (optionally present)
  misc_feature (1)..(19): ribonucleotide unmodified or modified as described for this sequence
ggcagagccacugcauggctt

SEQ ID NO: 2143 - DNA, 21 bp, Artificial Sequence
  Description of Artificial Sequence: Target Sequence/siNA antisense region (stab25)
  misc_feature (4)..(7): 2'-O-methyl
  misc_feature (8)..(9): 2'-deoxy-2'Fluoro
  misc_feature (10)..(10): 2'-O-methyl
  misc_feature (11)..(12): 2'-deoxy-2'Fluoro
  misc_feature (13)..(13): 2'-O-methyl
  misc_feature (14)..(14): 2'-deoxy-2'Fluoro
  misc_feature (15)..(15): 2'-O-methyl
  misc_feature (16)..(16): 2'-deoxy-2'Fluoro
  misc_feature (17)..(18): 2'-O-methyl
  misc_feature (19)..(19): 2'-deoxy-2'Fluoro
  misc_feature (20)..(20): Phosphorothioate or Phosphorodithioate 3'-Internucleotide Linkage (optionally present)
  misc_feature (1)..(19): ribonucleotide unmodified or modified as described for this sequence
ggcagagccacugcauggctt

SEQ ID NO: 2144 - RNA, 21 nt, Artificial Sequence
  Description of Artificial Sequence: Target Sequence/siNA antisense region (stab35)
  misc_feature (4)..(7): 2'-O-methyl
  misc_feature (8)..(9): 2'-deoxy-2'Fluoro
  misc_feature (10)..(10): 2'-O-methyl
  misc_feature (11)..(12): 2'-deoxy-2'Fluoro
  misc_feature (13)..(13): 2'-O-methyl
  misc_feature (14)..(14): 2'-deoxy-2'Fluoro
  misc_feature (15)..(15): 2'-O-methyl
  misc_feature (16)..(16): 2'-deoxy-2'Fluoro
  misc_feature (17)..(18): 2'-O-methyl
  misc_feature (19)..(19): 2'-deoxy-2'Fluoro
  misc_feature (20)..(21): 2'-O-methyl
ggcagagccacugcauggcuu

SEQ ID NO: 2145 - RNA, 21 nt, Artificial Sequence
  Description of Artificial Sequence: Target Sequence/siNA antisense region (stab36)
  misc_feature (4)..(7): 2'-O-methyl
  misc_feature (8)..(9): 2'-deoxy-2'Fluoro
  misc_feature (10)..(10): 2'-O-methyl
  misc_feature (11)..(12): 2'-deoxy-2'Fluoro
  misc_feature (13)..(13): 2'-O-methyl
  misc_feature (14)..(14): 2'-deoxy-2'Fluoro
  misc_feature (15)..(15): 2'-O-methyl
  misc_feature (16)..(16): 2'-deoxy-2'Fluoro
  misc_feature (17)..(18): 2'-O-methyl
  misc_feature (19)..(19): 2'-deoxy-2'Fluoro
  misc_feature (20)..(21): 2'-O-methyl
ggcagagccacugcauggcag

SEQ ID NO: 2146 - RNA, 19 nt, Artificial Sequence
  Description of Artificial Sequence: Target Sequence/siNA sense region
caccccgugggccaccguu

SEQ ID NO: 2147 - RNA, 19 nt, Artificial Sequence
  Description of Artificial Sequence: Target Sequence/siNA antisense region
aacgguggcccacggggug

SEQ ID NO: 2148 - DNA, 21 bp, Artificial Sequence
  Description of Artificial Sequence: Target Sequence/siNA sense region (stab00)
  misc_feature (1)..(19): ribonucleotide unmodified or modified as described for this sequence
caccccgugggccaccguutt

SEQ ID NO: 2149 - DNA, 21 bp, Artificial Sequence
  Description of Artificial Sequence: Target Sequence/siNA antisense region (stab00as)
  misc_feature (1)..(19): ribonucleotide unmodified or modified as described for this sequence
aacgguggcccacggggugtt

SEQ ID NO: 2150 - DNA, 21 bp, Artificial Sequence
  Description of Artificial Sequence: Target Sequence/siNA sense region (stab04)
  misc_feature (1)..(1): 5'-3 attached terminal deoxyabasic moiety, inverted abasic, inverted nucleotide or other terminal cap that is optionally present
  misc_feature (21)..(21): 3'-3 attached terminal deoxyabasic moiety, inverted abasic, inverted nucleotide or other terminal cap that is optionally present
  misc_feature (1)..(1): 2'-deoxy-2'Fluoro
  misc_feature (3)..(6): 2'-deoxy-2'Fluoro
  misc_feature (8)..(8): 2'-deoxy-2'Fluoro
  misc_feature (12)..(13): 2'-deoxy-2'Fluoro
  misc_feature (15)..(16): 2'-deoxy-2'Fluoro
  misc_feature (18)..(19): 2'-deoxy-2'Fluoro
  misc_feature (1)..(19): ribonucleotide unmodified or modified as described for this sequence
caccccgugggccaccguutt

SEQ ID NO: 2151 - DNA, 21 bp, Artificial Sequence
  Description of Artificial Sequence: Target Sequence/siNA antisense region (stab05)
  misc_feature (3)..(3): 2'-deoxy-2'Fluoro
  misc_feature (6)..(6): 2'-deoxy-2'Fluoro
  misc_feature (9)..(11): 2'-deoxy-2'Fluoro
  misc_feature (13)..(13): 2'-deoxy-2'Fluoro
  misc_feature (18)..(18): 2'-deoxy-2'Fluoro
  misc_feature (20)..(20): Phosphorothioate or Phosphorodithioate 3'-Internucleotide Linkage (optionally present)
  misc_feature (1)..(19): ribonucleotide unmodified or modified as described for this sequence
aacgguggcccacggggugtt

SEQ ID NO: 2152 - DNA, 21 bp, Artificial Sequence
  Description of Artificial Sequence: Target Sequence/siNA sense region (stab07)
  misc_feature (1)..(1): 5'-3 attached terminal deoxyabasic moiety, inverted abasic, inverted nucleotide or other terminal cap that is optionally present
  misc_feature (21)..(21): 3'-3 attached terminal deoxyabasic moiety, inverted abasic, inverted nucleotide or other terminal cap that is optionally present
  misc_feature (1)..(1): 2'-deoxy-2'Fluoro
  misc_feature (3)..(6): 2'-deoxy-2'Fluoro
  misc_feature (8)..(8): 2'-deoxy-2'Fluoro
  misc_feature (12)..(13): 2'-deoxy-2'Fluoro
  misc_feature (15)..(16): 2'-deoxy-2'Fluoro
  misc_feature (18)..(19): 2'-deoxy-2'Fluoro
  misc_feature (1)..(19): ribonucleotide unmodified or modified as described for this sequence
caccccgugggccaccguutt

SEQ ID NO: 2153 - DNA, 21 bp, Artificial Sequence
  Description of Artificial Sequence: Target Sequence/siNA antisense region (stab08)
  misc_feature (1)..(2): 2'-O-methyl
  misc_feature (3)..(3): 2'-deoxy-2'Fluoro
  misc_feature (4)..(5): 2'-O-methyl
  misc_feature (6)..(6): 2'-deoxy-2'Fluoro
  misc_feature (7)..(8): 2'-O-methyl
  misc_feature (9)..(11): 2'-deoxy-2'Fluoro
  misc_feature (12)..(12): 2'-O-methyl
  misc_feature (13)..(13): 2'-deoxy-2'Fluoro
  misc_feature (14)..(17): 2'-O-methyl
  misc_feature (18)..(18): 2'-deoxy-2'Fluoro
  misc_feature (19)..(19): 2'-O-methyl
  misc_feature (20)..(20): Phosphorothioate or Phosphorodithioate 3'-Internucleotide Linkage (optionally present)
  misc_feature (1)..(19): ribonucleotide unmodified or modified as described for this sequence
aacgguggcccacggggugtt

SEQ ID NO: 2154 - DNA, 21 bp, Artificial Sequence
  Description of Artificial Sequence: Target Sequence/siNA sense region (stab09)
  misc_feature (1)..(1): 5'-3 attached terminal deoxyabasic moiety, inverted abasic, inverted nucleotide or other terminal cap that is optionally present
  misc_feature (21)..(21): 3'-3 attached terminal deoxyabasic moiety, inverted abasic, inverted nucleotide or other terminal cap that is optionally present
  misc_feature (1)..(19): ribonucleotide unmodified or modified as described for this sequence
caccccgugggccaccguutt

SEQ ID NO: 2155 - DNA, 21 bp, Artificial Sequence
  Description of Artificial Sequence: Target Sequence/siNA antisense region (stab10)
  misc_feature (20)..(20): Phosphorothioate or Phosphorodithioate 3'-Internucleotide Linkage (optionally present)
  misc_feature (1)..(19): ribonucleotide unmodified or modified as described for this sequence
aacgguggcccacggggugtt

SEQ ID NO: 2156 - DNA, 21 bp, Artificial Sequence
  Description of Artificial Sequence: Target Sequence/siNA antisense region (stab19)
  misc_feature (21)..(21): 3'-3 attached terminal deoxyabasic moiety, inverted abasic, inverted nucleotide or other terminal cap that is optionally present
  misc_feature (1)..(2): 2'-O-methyl
  misc_feature (3)..(3): 2'-deoxy-2'Fluoro
  misc_feature (4)..(5): 2'-O-methyl
  misc_feature (6)..(6): 2'-deoxy-2'Fluoro
  misc_feature (7)..(8): 2'-O-methyl
  misc_feature (9)..(11): 2'-deoxy-2'Fluoro
  misc_feature (12)..(12): 2'-O-methyl
  misc_feature (13)..(13): 2'-deoxy-2'Fluoro
  misc_feature (14)..(17): 2'-O-methyl
  misc_feature (18)..(18): 2'-deoxy-2'Fluoro
  misc_feature (19)..(19): 2'-O-methyl
  misc_feature (1)..(19): ribonucleotide unmodified or modified as described for this sequence
aacgguggcccacggggugtt

SEQ ID NO: 2157 - DNA, 21 bp, Artificial Sequence
  Description of Artificial Sequence: Target Sequence/siNA antisense region (stab22)
  misc_feature (21)..(21): 3'-3 attached terminal deoxyabasic moiety, inverted abasic, inverted nucleotide or other terminal cap that is optionally present
  misc_feature (20)..(20): Phosphorothioate or Phosphorodithioate 3'-Internucleotide Linkage (optionally present)
  misc_feature (1)..(19): ribonucleotide unmodified or modified as described for this sequence
aacgguggcccacggggugtt

SEQ ID NO: 2158 - DNA, 21 bp, Artificial Sequence
  Description of Artificial Sequence: Target Sequence/siNA antisense region (stab25)
  misc_feature (4)..(5): 2'-O-methyl
  misc_feature (6)..(6): 2'-deoxy-2'Fluoro
  misc_feature (7)..(8): 2'-O-methyl
  misc_feature (9)..(11): 2'-deoxy-2'Fluoro
  misc_feature (12)..(12): 2'-O-methyl
  misc_feature (13)..(13): 2'-deoxy-2'Fluoro
  misc_feature (14)..(17): 2'-O-methyl
  misc_feature (18)..(18): 2'-deoxy-2'Fluoro
  misc_feature (19)..(19): 2'-O-methyl
  misc_feature (20)..(20): Phosphorothioate or Phosphorodithioate 3'-Internucleotide Linkage (optionally present)
  misc_feature (1)..(19): ribonucleotide unmodified or modified as described for this sequence
aacgguggcccacggggugtt

SEQ ID NO: 2159 - RNA, 21 nt, Artificial Sequence
  Description of Artificial Sequence: Target Sequence/siNA antisense region (stab35)
  misc_feature (4)..(5): 2'-O-methyl
  misc_feature (6)..(6): 2'-deoxy-2'Fluoro
  misc_feature (7)..(8): 2'-O-methyl
  misc_feature (9)..(11): 2'-deoxy-2'Fluoro
  misc_feature (12)..(12): 2'-O-methyl
  misc_feature (13)..(13): 2'-deoxy-2'Fluoro
  misc_feature (14)..(17): 2'-O-methyl
  misc_feature (18)..(18): 2'-deoxy-2'Fluoro
  misc_feature (19)..(21): 2'-O-methyl
aacgguggcccacgggguguu

SEQ ID NO: 2160 - RNA, 21 nt, Artificial Sequence
  Description of Artificial Sequence: Target Sequence/siNA antisense region (stab36)
  misc_feature (4)..(5): 2'-O-methyl
  misc_feature (6)..(6): 2'-deoxy-2'Fluoro
  misc_feature (7)..(8): 2'-O-methyl
  misc_feature (9)..(11): 2'-deoxy-2'Fluoro
  misc_feature (12)..(12): 2'-O-methyl
  misc_feature (13)..(13): 2'-deoxy-2'Fluoro
  misc_feature (14)..(17): 2'-O-methyl
  misc_feature (18)..(18): 2'-deoxy-2'Fluoro
  misc_feature (19)..(21): 2'-O-methyl
aacgguggcccacgggguggc

SEQ ID NO: 2161 - RNA, 19 nt, Artificial Sequence
  Description of Artificial Sequence: Target Sequence/siNA sense region
uucuucguggauggggacu

SEQ ID NO: 2162 - RNA, 19 nt, Artificial Sequence
  Description of Artificial Sequence: Target Sequence/siNA antisense region
aguccccauccacgaagaa

SEQ ID NO: 2163 - DNA, 21 bp, Artificial Sequence
  Description of Artificial Sequence: Target Sequence/siNA sense region (stab00)
  misc_feature (1)..(19): ribonucleotide unmodified or modified as described for this sequence
uucuucguggauggggacutt

SEQ ID NO: 2164 - DNA, 21 bp, Artificial Sequence
  Description of Artificial Sequence: Target Sequence/siNA antisense region (stab00as)
  misc_feature (1)..(19): ribonucleotide unmodified or modified as described for this sequence
aguccccauccacgaagaatt

SEQ ID NO: 2165 - DNA, 21 bp, Artificial Sequence
  Description of Artificial Sequence: Target Sequence/siNA sense region (stab04)
  misc_feature (1)..(1): 5'-3 attached terminal deoxyabasic moiety, inverted abasic, inverted nucleotide or other terminal cap that is optionally present
  misc_feature (21)..(21): 3'-3 attached terminal deoxyabasic moiety, inverted abasic, inverted nucleotide or other terminal cap that is optionally present
  misc_feature (1)..(6): 2'-deoxy-2'Fluoro
  misc_feature (8)..(8): 2'-deoxy-2'Fluoro
  misc_feature (12)..(12): 2'-deoxy-2'Fluoro
  misc_feature (18)..(19): 2'-deoxy-2'Fluoro
  misc_feature (1)..(19): ribonucleotide unmodified or modified as described for this sequence
uucuucguggauggggacutt

SEQ ID NO: 2166 - DNA, 21 bp, Artificial Sequence
  Description of Artificial Sequence: Target Sequence/siNA antisense region (stab05)
  misc_feature (3)..(7): 2'-deoxy-2'Fluoro
  misc_feature (9)..(11): 2'-deoxy-2'Fluoro
  misc_feature (13)..(13): 2'-deoxy-2'Fluoro
  misc_feature (20)..(20): Phosphorothioate or Phosphorodithioate 3'-Internucleotide Linkage (optionally present)
  misc_feature (1)..(19): ribonucleotide unmodified or modified as described for this sequence
aguccccauccacgaagaatt

SEQ ID NO: 2167 - DNA, 21 bp, Artificial Sequence
  Description of Artificial Sequence: Target Sequence/siNA sense region (stab07)
  misc_feature (1)..(1): 5'-3 attached terminal deoxyabasic moiety, inverted abasic, inverted nucleotide or other terminal cap that is optionally present
  misc_feature (21)..(21): 3'-3 attached terminal deoxyabasic moiety, inverted abasic, inverted nucleotide or other terminal cap that is optionally present
  misc_feature (1)..(6): 2'-deoxy-2'Fluoro
  misc_feature (8)..(8): 2'-deoxy-2'Fluoro
  misc_feature (12)..(12): 2'-deoxy-2'Fluoro
  misc_feature (18)..(19): 2'-deoxy-2'Fluoro
  misc_feature (1)..(19): ribonucleotide unmodified or modified as described for this sequence
uucuucguggauggggacutt

SEQ ID NO: 2168 - DNA, 21 bp, Artificial Sequence
  Description of Artificial Sequence: Target Sequence/siNA antisense region (stab08)
  misc_feature (1)..(2): 2'-O-methyl
  misc_feature (3)..(7): 2'-deoxy-2'Fluoro
  misc_feature (8)..(8): 2'-O-methyl
  misc_feature (9)..(11): 2'-deoxy-2'Fluoro
  misc_feature (12)..(12): 2'-O-methyl
  misc_feature (13)..(13): 2'-deoxy-2'Fluoro
  misc_feature (14)..(19): 2'-O-methyl
  misc_feature (20)..(20): Phosphorothioate or Phosphorodithioate 3'-Internucleotide Linkage (optionally present)
  misc_feature (1)..(19): ribonucleotide unmodified or modified as described for this sequence
aguccccauccacgaagaatt

SEQ ID NO: 2169 - DNA, 21 bp, Artificial Sequence
  Description of Artificial Sequence: Target Sequence/siNA sense region (stab09)
  misc_feature (1)..(1): 5'-3 attached terminal deoxyabasic moiety, inverted abasic, inverted nucleotide or other terminal cap that is optionally present
  misc_feature (21)..(21): 3'-3 attached terminal deoxyabasic moiety, inverted abasic, inverted nucleotide or other terminal cap that is optionally present
  misc_feature (1)..(19): ribonucleotide unmodified or modified as described for this sequence
uucuucguggauggggacutt

SEQ ID NO: 2170 - DNA, 21 bp, Artificial Sequence
  Description of Artificial Sequence: Target Sequence/siNA antisense region (stab10)
  misc_feature (20)..(20): Phosphorothioate or Phosphorodithioate 3'-Internucleotide Linkage (optionally present)
  misc_feature (1)..(19): ribonucleotide unmodified or modified as described for this sequence
aguccccauccacgaagaatt

SEQ ID NO: 2171 - DNA, 21 bp, Artificial Sequence
  Description of Artificial Sequence: Target Sequence/siNA antisense region (stab19)
  misc_feature (21)..(21): 3'-3 attached terminal deoxyabasic moiety, inverted abasic, inverted nucleotide or other terminal cap that is optionally present
  misc_feature (1)..(2): 2'-O-methyl
  misc_feature (3)..(7): 2'-deoxy-2'Fluoro
  misc_feature (8)..(8): 2'-O-methyl
  misc_feature (9)..(11): 2'-deoxy-2'Fluoro
  misc_feature (12)..(12): 2'-O-methyl
  misc_feature (13)..(13): 2'-deoxy-2'Fluoro
  misc_feature (14)..(19): 2'-O-methyl
  misc_feature (1)..(19): ribonucleotide unmodified or modified as described for this sequence
aguccccauccacgaagaatt

SEQ ID NO: 2172 - DNA, 21 bp, Artificial Sequence
  Description of Artificial Sequence: Target Sequence/siNA antisense region (stab22)
  misc_feature (21)..(21): 3'-3 attached terminal deoxyabasic moiety, inverted abasic, inverted nucleotide or other terminal cap that is optionally present
  misc_feature (20)..(20): Phosphorothioate or Phosphorodithioate 3'-Internucleotide Linkage (optionally present)
  misc_feature (1)..(19): ribonucleotide unmodified or modified as described for this sequence
aguccccauccacgaagaatt

SEQ ID NO: 2173 - DNA, 21 bp, Artificial Sequence
  Description of Artificial Sequence: Target Sequence/siNA antisense region (stab25)
  misc_feature (4)..(7): 2'-deoxy-2'Fluoro
  misc_feature (8)..(8): 2'-O-methyl
  misc_feature (9)..(11): 2'-deoxy-2'Fluoro
  misc_feature (12)..(12): 2'-O-methyl
  misc_feature (13)..(13): 2'-deoxy-2'Fluoro
  misc_feature (14)..(19): 2'-O-methyl
  misc_feature (20)..(20): Phosphorothioate or Phosphorodithioate 3'-Internucleotide Linkage (optionally present)
  misc_feature (1)..(19): ribonucleotide unmodified or modified as described for this sequence
aguccccauccacgaagaatt

SEQ ID NO: 2174 - RNA, 21 nt, Artificial Sequence
  Description of Artificial Sequence: Target Sequence/siNA antisense region (stab35)
  misc_feature (4)..(7): 2'-deoxy-2'Fluoro
  misc_feature (8)..(8): 2'-O-methyl
  misc_feature (9)..(11): 2'-deoxy-2'Fluoro
  misc_feature (12)..(12): 2'-O-methyl
  misc_feature (13)..(13): 2'-deoxy-2'Fluoro
  misc_feature (14)..(21): 2'-O-methyl
aguccccauccacgaagaauu

SEQ ID NO: 2175 - RNA, 21 nt, Artificial Sequence
  Description of Artificial Sequence: Target Sequence/siNA antisense region (stab36)
  misc_feature (4)..(7): 2'-deoxy-2'Fluoro
  misc_feature (8)..(8): 2'-O-methyl
  misc_feature (9)..(11): 2'-deoxy-2'Fluoro
  misc_feature (12)..(12): 2'-O-methyl
  misc_feature (13)..(13): 2'-deoxy-2'Fluoro
  misc_feature (14)..(21): 2'-O-methyl
aguccccauccacgaagaaac

SEQ ID NO: 2176 - RNA, 19 nt, Artificial Sequence
  Description of Artificial Sequence: Target Sequence/siNA sense region
ugguccgugcucaguaccc

SEQ ID NO: 2177 - RNA, 19 nt, Artificial Sequence
  Description of Artificial Sequence: Target Sequence/siNA antisense region
ggguacugagcacggacca

SEQ ID NO: 2178 - DNA, 21 bp, Artificial Sequence
  Description of Artificial Sequence: Target Sequence/siNA sense region (stab00)
  misc_feature (1)..(19): ribonucleotide unmodified or modified as described for this sequence
ugguccgugcucaguaccctt

SEQ ID NO: 2179 - DNA, 21 bp, Artificial Sequence
  Description of Artificial Sequence: Target Sequence/siNA antisense region (stab00as)
  misc_feature (1)..(19): ribonucleotide unmodified or modified as described for this sequence
ggguacugagcacggaccatt

SEQ ID NO: 2180 - DNA, 21 bp, Artificial Sequence
  Description of Artificial Sequence: Target Sequence/siNA sense region (stab04)
  misc_feature (1)..(1): 5'-3 attached terminal deoxyabasic moiety, inverted abasic, inverted nucleotide or other terminal cap that is optionally present
  misc_feature (21)..(21): 3'-3 attached terminal deoxyabasic moiety, inverted abasic, inverted nucleotide or other terminal cap that is optionally present
  misc_feature (1)..(1): 2'-deoxy-2'Fluoro
  misc_feature (4)..(6): 2'-deoxy-2'Fluoro
  misc_feature (8)..(8): 2'-deoxy-2'Fluoro
  misc_feature (10)..(12): 2'-deoxy-2'Fluoro
  misc_feature (15)..(15): 2'-deoxy-2'Fluoro
  misc_feature (17)..(19): 2'-deoxy-2'Fluoro
  misc_feature (1)..(19): ribonucleotide unmodified or modified as described for this sequence
ugguccgugcucaguaccctt

SEQ ID NO: 2181 - DNA, 21 bp, Artificial Sequence
  Description of Artificial Sequence: Target Sequence/siNA antisense region (stab05)
  misc_feature (4)..(4): 2'-deoxy-2'Fluoro
  misc_feature (6)..(7): 2'-deoxy-2'Fluoro
  misc_feature (11)..(11): 2'-deoxy-2'Fluoro
  misc_feature (13)..(13): 2'-deoxy-2'Fluoro
  misc_feature (17)..(18): 2'-deoxy-2'Fluoro
  misc_feature (20)..(20): Phosphorothioate or Phosphorodithioate 3'-Internucleotide Linkage (optionally present)
  misc_feature (1)..(19): ribonucleotide unmodified or modified as described for this sequence
ggguacugagcacggaccatt

SEQ ID NO: 2182 - DNA, 21 bp, Artificial Sequence
  Description of Artificial Sequence: Target Sequence/siNA sense region (stab07)
  misc_feature (1)..(1): 5'-3 attached terminal deoxyabasic moiety, inverted abasic, inverted nucleotide or other terminal cap that is optionally present
  misc_feature (21)..(21): 3'-3 attached terminal deoxyabasic moiety, inverted abasic, inverted nucleotide or other terminal cap that is optionally present
  misc_feature (1)..(1): 2'-deoxy-2'Fluoro
  misc_feature (4)..(6): 2'-deoxy-2'Fluoro
  misc_feature (8)..(8): 2'-deoxy-2'Fluoro
  misc_feature (10)..(12): 2'-deoxy-2'Fluoro
  misc_feature (15)..(15): 2'-deoxy-2'Fluoro
  misc_feature (17)..(19): 2'-deoxy-2'Fluoro
  misc_feature (1)..(19): ribonucleotide unmodified or modified as described for this sequence
ugguccgugcucaguaccctt

SEQ ID NO: 2183 - DNA, 21 bp, Artificial Sequence
  Description of Artificial Sequence: Target Sequence/siNA antisense region (stab08)
  misc_feature (1)..(3): 2'-O-methyl
  misc_feature (4)..(4): 2'-deoxy-2'Fluoro
  misc_feature (5)..(5): 2'-O-methyl
  misc_feature (6)..(7): 2'-deoxy-2'Fluoro
  misc_feature (8)..(10): 2'-O-methyl
  misc_feature (11)..(11): 2'-deoxy-2'Fluoro
  misc_feature (12)..(12): 2'-O-methyl
  misc_feature (13)..(13): 2'-deoxy-2'Fluoro
  misc_feature (14)..(16): 2'-O-methyl
  misc_feature (17)..(18): 2'-deoxy-2'Fluoro
  misc_feature (19)..(19): 2'-O-methyl
  misc_feature (20)..(20): Phosphorothioate or Phosphorodithioate 3'-Internucleotide Linkage (optionally present)
  misc_feature (1)..(19): ribonucleotide unmodified or modified as described for this sequence
ggguacugagcacggaccatt

SEQ ID NO: 2184 - DNA, 21 bp, Artificial Sequence
  Description of Artificial Sequence: Target Sequence/siNA sense region (stab09)
  misc_feature (1)..(1): 5'-3 attached terminal deoxyabasic moiety, inverted abasic, inverted nucleotide or other terminal cap that is optionally present
  misc_feature (21)..(21): 3'-3 attached terminal deoxyabasic moiety, inverted abasic, inverted nucleotide or other terminal cap that is optionally present
  misc_feature (1)..(19): ribonucleotide unmodified or modified as described for this sequence
ugguccgugcucaguaccctt

SEQ ID NO: 2185 - DNA, 21 bp, Artificial Sequence
  Description of Artificial Sequence: Target Sequence/siNA antisense region (stab10)
  misc_feature (20)..(20): Phosphorothioate or Phosphorodithioate 3'-Internucleotide Linkage (optionally present)
  misc_feature (1)..(19): ribonucleotide unmodified or modified as described for this sequence
ggguacugagcacggaccatt

SEQ ID NO: 2186 - DNA, 21 bp, Artificial Sequence
  Description of Artificial Sequence: Target Sequence/siNA antisense region (stab19)
  misc_feature (21)..(21): 3'-3 attached terminal deoxyabasic moiety, inverted abasic, inverted nucleotide or other terminal cap that is optionally present
  misc_feature (1)..(3): 2'-O-methyl
  misc_feature (4)..(4): 2'-deoxy-2'Fluoro
  misc_feature (5)..(5): 2'-O-methyl
  misc_feature (6)..(7): 2'-deoxy-2'Fluoro
  misc_feature (8)..(10): 2'-O-methyl
  misc_feature (11)..(11): 2'-deoxy-2'Fluoro
  misc_feature (12)..(12): 2'-O-methyl
  misc_feature (13)..(13): 2'-deoxy-2'Fluoro
  misc_feature (14)..(16): 2'-O-methyl
  misc_feature (17)..(18): 2'-deoxy-2'Fluoro
  misc_feature (19)..(19): 2'-O-methyl
  misc_feature (1)..(19): ribonucleotide unmodified or modified as described for this sequence
ggguacugagcacggaccatt

SEQ ID NO: 2187 - DNA, 21 bp, Artificial Sequence
  Description of Artificial Sequence: Target Sequence/siNA antisense region (stab22)
  misc_feature (21)..(21): 3'-3 attached terminal deoxyabasic moiety, inverted abasic, inverted nucleotide or other terminal cap that is optionally present
  misc_feature (20)..(20): Phosphorothioate or Phosphorodithioate 3'-Internucleotide Linkage (optionally present)
  misc_feature (1)..(19): ribonucleotide unmodified or modified as described for this sequence
ggguacugagcacggaccatt

SEQ ID NO: 2188 - DNA, 21 bp, Artificial Sequence
  Description of Artificial Sequence: Target Sequence/siNA antisense region (stab25)
  misc_feature (4)..(4): 2'-deoxy-2'Fluoro
  misc_feature (5)..(5): 2'-O-methyl
  misc_feature (6)..(7): 2'-deoxy-2'Fluoro
  misc_feature (8)..(10): 2'-O-methyl
  misc_feature (11)..(11): 2'-deoxy-2'Fluoro
  misc_feature (12)..(12): 2'-O-methyl
  misc_feature (13)..(13): 2'-deoxy-2'Fluoro
  misc_feature (14)..(16): 2'-O-methyl
  misc_feature (17)..(18): 2'-deoxy-2'Fluoro
  misc_feature (19)..(19): 2'-O-methyl
  misc_feature (20)..(20): Phosphorothioate or Phosphorodithioate 3'-Internucleotide Linkage (optionally present)
  misc_feature (1)..(19): ribonucleotide unmodified or modified as described for this sequence
ggguacugagcacggaccatt

SEQ ID NO: 2189 - RNA, 21 nt, Artificial Sequence
  Description of Artificial Sequence: Target Sequence/siNA antisense region (stab35)
  misc_feature (4)..(4): 2'-deoxy-2'Fluoro
  misc_feature (5)..(5): 2'-O-methyl
  misc_feature (6)..(7): 2'-deoxy-2'Fluoro
  misc_feature (8)..(10): 2'-O-methyl
  misc_feature (11)..(11): 2'-deoxy-2'Fluoro
  misc_feature (12)..(12): 2'-O-methyl
  misc_feature (13)..(13): 2'-deoxy-2'Fluoro
  misc_feature (14)..(16): 2'-O-methyl
  misc_feature (17)..(18): 2'-deoxy-2'Fluoro
  misc_feature (19)..(21): 2'-O-methyl
ggguacugagcacggaccauu

SEQ ID NO: 2190 - RNA, 21 nt, Artificial Sequence
  Description of Artificial Sequence: Target Sequence/siNA antisense region (stab36)
  misc_feature (4)..(4): 2'-deoxy-2'Fluoro
  misc_feature (5)..(5): 2'-O-methyl
  misc_feature (6)..(7): 2'-deoxy-2'Fluoro
  misc_feature (8)..(10): 2'-O-methyl
  misc_feature (11)..(11): 2'-deoxy-2'Fluoro
  misc_feature (12)..(12): 2'-O-methyl
  misc_feature (13)..(13): 2'-deoxy-2'Fluoro
  misc_feature (14)..(16): 2'-O-methyl
  misc_feature (17)..(18): 2'-deoxy-2'Fluoro
  misc_feature (19)..(21): 2'-O-methyl
ggguacugagcacggaccagu

SEQ ID NO: 2191 - RNA, 19 nt, Artificial Sequence
  Description of Artificial Sequence: Target Sequence/siNA sense region
ccaugggagagccuguaca

SEQ ID NO: 2192 - RNA, 19 nt, Artificial Sequence
  Description of Artificial Sequence: Target Sequence/siNA antisense region
uguacaggcucucccaugg

SEQ ID NO: 2193 - DNA, 21 bp, Artificial Sequence
  Description of Artificial Sequence: Target Sequence/siNA sense region (stab00)
  misc_feature (1)..(19): ribonucleotide unmodified or modified as described for this sequence
ccaugggagagccuguacatt

SEQ ID NO: 2194 - DNA, 21 bp, Artificial Sequence
  Description of Artificial Sequence: Target Sequence/siNA antisense region (stab00as)
  misc_feature (1)..(19): ribonucleotide unmodified or modified as described for this sequence
uguacaggcucucccauggtt

SEQ ID NO: 2195 - DNA, 21 bp, Artificial Sequence
  Description of Artificial Sequence: Target Sequence/siNA sense region (stab04)
  misc_feature (1)..(1): 5'-3 attached terminal deoxyabasic moiety, inverted abasic, inverted nucleotide or other terminal cap that is optionally present
  misc_feature (21)..(21): 3'-3 attached terminal deoxyabasic moiety, inverted abasic, inverted nucleotide or other terminal cap that is optionally present
  misc_feature (1)..(2): 2'-deoxy-2'Fluoro
  misc_feature (4)..(4): 2'-deoxy-2'Fluoro
  misc_feature (12)..(14): 2'-deoxy-2'Fluoro
  misc_feature (16)..(16): 2'-deoxy-2'Fluoro
  misc_feature (18)..(18): 2'-deoxy-2'Fluoro
  misc_feature (1)..(19): ribonucleotide unmodified or modified as described for this sequence
ccaugggagagccuguacatt

SEQ ID NO: 2196 - DNA, 21 bp, Artificial Sequence
  Description of Artificial Sequence: Target Sequence/siNA antisense region (stab05)
  misc_feature (1)..(1): 2'-deoxy-2'Fluoro
  misc_feature (3)..(3): 2'-deoxy-2'Fluoro
  misc_feature (5)..(5): 2'-deoxy-2'Fluoro
  misc_feature (9)..(15): 2'-deoxy-2'Fluoro
  misc_feature (17)..(17): 2'-deoxy-2'Fluoro
  misc_feature (20)..(20): Phosphorothioate or Phosphorodithioate 3'-Internucleotide Linkage (optionally present)
  misc_feature (1)..(19): ribonucleotide unmodified or modified as described for this sequence
uguacaggcucucccauggtt

SEQ ID NO: 2197 - DNA, 21 bp, Artificial Sequence
  Description of Artificial Sequence: Target Sequence/siNA sense region (stab07)
  misc_feature (1)..(1): 5'-3 attached terminal deoxyabasic moiety, inverted abasic, inverted nucleotide or other terminal cap that is optionally present
  misc_feature (21)..(21): 3'-3 attached terminal deoxyabasic moiety, inverted abasic, inverted nucleotide or other terminal cap that is optionally present
  misc_feature (1)..(2): 2'-deoxy-2'Fluoro
  misc_feature (4)..(4): 2'-deoxy-2'Fluoro
  misc_feature (12)..(14): 2'-deoxy-2'Fluoro
  misc_feature (16)..(16): 2'-deoxy-2'Fluoro
  misc_feature (18)..(18): 2'-deoxy-2'Fluoro
  misc_feature (1)..(19): ribonucleotide unmodified or modified as described for this sequence
ccaugggagagccuguacatt

SEQ ID NO: 2198 - DNA, 21 bp, Artificial Sequence
  Description of Artificial Sequence: Target Sequence/siNA antisense region (stab08)
  misc_feature (1)..(1): 2'-deoxy-2'Fluoro
  misc_feature (2)..(2): 2'-O-methyl
  misc_feature (3)..(3): 2'-deoxy-2'Fluoro
  misc_feature (4)..(4): 2'-O-methyl
  misc_feature (5)..(5): 2'-deoxy-2'Fluoro
  misc_feature (6)..(8): 2'-O-methyl
  misc_feature (9)..(15): 2'-deoxy-2'Fluoro
  misc_feature (16)..(16): 2'-O-methyl
  misc_feature (17)..(17): 2'-deoxy-2'Fluoro
  misc_feature (18)..(19): 2'-O-methyl
  misc_feature (20)..(20): Phosphorothioate or Phosphorodithioate 3'-Internucleotide Linkage (optionally present)
  misc_feature (1)..(19): ribonucleotide unmodified or modified as described for this sequence
uguacaggcucucccauggtt

SEQ ID NO: 2199 - DNA, 21 bp, Artificial Sequence
  Description of Artificial Sequence: Target Sequence/siNA sense region (stab09)
  misc_feature (1)..(1): 5'-3 attached terminal deoxyabasic moiety, inverted abasic, inverted nucleotide or other terminal cap that is optionally present
  misc_feature (21)..(21): 3'-3 attached terminal deoxyabasic moiety, inverted abasic, inverted nucleotide or other terminal cap that is optionally present
  misc_feature (1)..(19): ribonucleotide unmodified or modified as described for this sequence
ccaugggagagccuguacatt

SEQ ID NO: 2200 - DNA, 21 bp, Artificial Sequence
  Description of Artificial Sequence: Target Sequence/siNA antisense region (stab10)
  misc_feature (20)..(20): Phosphorothioate or Phosphorodithioate 3'-Internucleotide Linkage (optionally present)
  misc_feature (1)..(19): ribonucleotide unmodified or modified as described for this sequence
uguacaggcucucccauggtt

SEQ ID NO: 2201 - DNA, 21 bp, Artificial Sequence
  Description of Artificial Sequence: Target Sequence/siNA antisense region (stab19)
  misc_feature (21)..(21): 3'-3 attached terminal deoxyabasic moiety, inverted abasic, inverted nucleotide or other terminal cap that is optionally present
  misc_feature (1)..(1): 2'-deoxy-2'Fluoro
  misc_feature (2)..(2): 2'-O-methyl
  misc_feature (3)..(3): 2'-deoxy-2'Fluoro
  misc_feature (4)..(4): 2'-O-methyl
  misc_feature (5)..(5): 2'-deoxy-2'Fluoro
  misc_feature (6)..(8): 2'-O-methyl
  misc_feature (9)..(15): 2'-deoxy-2'Fluoro
  misc_feature (16)..(16): 2'-O-methyl
  misc_feature (17)..(17): 2'-deoxy-2'Fluoro
  misc_feature (18)..(19): 2'-O-methyl
  misc_feature (1)..(19): ribonucleotide unmodified or modified as described for this sequence
uguacaggcucucccauggtt

SEQ ID NO: 2202 - DNA, 21 bp, Artificial Sequence
  Description of Artificial Sequence: Target Sequence/siNA antisense region (stab22)
  misc_feature (21)..(21): 3'-3 attached terminal deoxyabasic moiety, inverted abasic, inverted nucleotide or other terminal cap that is optionally present
  misc_feature (20)..(20): Phosphorothioate or Phosphorodithioate 3'-Internucleotide Linkage (optionally present)
  misc_feature (1)..(19): ribonucleotide unmodified or modified as described for this sequence
uguacaggcucucccauggtt

SEQ ID NO: 2203 - DNA, 21 bp, Artificial Sequence
  Description of Artificial Sequence: Target Sequence/siNA antisense region (stab25)
  misc_feature (4)..(4): 2'-O-methyl
  misc_feature (5)..(5): 2'-deoxy-2'Fluoro
  misc_feature (6)..(8): 2'-O-methyl
  misc_feature (9)..(15): 2'-deoxy-2'Fluoro
  misc_feature (16)..(16): 2'-O-methyl
  misc_feature (17)..(17): 2'-deoxy-2'Fluoro
  misc_feature (18)..(19): 2'-O-methyl
  misc_feature (20)..(20): Phosphorothioate or Phosphorodithioate 3'-Internucleotide Linkage (optionally present)
  misc_feature (1)..(19): ribonucleotide unmodified or modified as described for this sequence
uguacaggcucucccauggtt

SEQ ID NO: 2204 - RNA, 21 nt, Artificial Sequence
  Description of Artificial Sequence: Target Sequence/siNA antisense region (stab35)
  misc_feature (4)..(4): 2'-O-methyl
  misc_feature (5)..(5): 2'-deoxy-2'Fluoro
  misc_feature (6)..(8): 2'-O-methyl
  misc_feature (9)..(15): 2'-deoxy-2'Fluoro
  misc_feature (16)..(16): 2'-O-methyl
  misc_feature (17)..(17): 2'-deoxy-2'Fluoro
  misc_feature (18)..(21): 2'-O-methyl
uguacaggcucucccaugguu

SEQ ID NO: 2205 - RNA, 21 nt, Artificial Sequence
  Description of Artificial Sequence: Target Sequence/siNA antisense region (stab36)
  misc_feature (4)..(4): 2'-O-methyl
  misc_feature (5)..(5): 2'-deoxy-2'Fluoro
  misc_feature (6)..(8): 2'-O-methyl
  misc_feature (9)..(15): 2'-deoxy-2'Fluoro
  misc_feature (16)..(16): 2'-O-methyl
  misc_feature (17)..(17): 2'-deoxy-2'Fluoro
  misc_feature (18)..(21): 2'-O-methyl
uguacaggcucucccaugggg

SEQ ID NO: 2206 - RNA, 19 nt, Artificial Sequence
  Description of Artificial Sequence: Target Sequence/siNA sense region
agcuuggccgggaacccag

SEQ ID NO: 2207 - RNA, 19 nt, Artificial Sequence
  Description of Artificial Sequence: Target Sequence/siNA antisense region
cuggguucccggccaagcu

SEQ ID NO: 2208 - DNA, 21 bp, Artificial Sequence
  Description of Artificial Sequence: Target Sequence/siNA sense region (stab00)
  misc_feature (1)..(19): ribonucleotide unmodified or modified as described for this sequence
agcuuggccgggaacccagtt

SEQ ID NO: 2209 - DNA, 21 bp, Artificial Sequence
  Description of Artificial Sequence: Target Sequence/siNA antisense region (stab00as)
  misc_feature (1)..(19): ribonucleotide unmodified or modified as described for this sequence
cuggguucccggccaagcutt

SEQ ID NO: 2210 - DNA, 21 bp, Artificial Sequence
  Description of Artificial Sequence: Target Sequence/siNA sense region (stab04)
  misc_feature (1)..(1): 5'-3 attached terminal deoxyabasic moiety, inverted abasic, inverted nucleotide or other terminal cap that is optionally present
  misc_feature (21)..(21): 3'-3 attached terminal deoxyabasic moiety, inverted abasic, inverted nucleotide or other terminal cap that is optionally present
  misc_feature (3)..(5): 2'-deoxy-2'Fluoro
  misc_feature (8)..(9): 2'-deoxy-2'Fluoro
  misc_feature (15)..(17): 2'-deoxy-2'Fluoro
  misc_feature (1)..(19): ribonucleotide unmodified or modified as described for this sequence
agcuuggccgggaacccagtt

SEQ ID NO: 2211 - DNA, 21 bp, Artificial Sequence
  Description of Artificial Sequence: Target Sequence/siNA antisense region (stab05)
  misc_feature (1)..(2): 2'-deoxy-2'Fluoro
  misc_feature (6)..(10): 2'-deoxy-2'Fluoro
  misc_feature (13)..(14): 2'-deoxy-2'Fluoro
  misc_feature (18)..(19): 2'-deoxy-2'Fluoro
  misc_feature (20)..(20): Phosphorothioate or Phosphorodithioate 3'-Internucleotide Linkage (optionally present)
  misc_feature (1)..(19): ribonucleotide unmodified or modified as described for this sequence
cuggguucccggccaagcutt

SEQ ID NO: 2212 - DNA, 21 bp, Artificial Sequence
  Description of Artificial Sequence: Target Sequence/siNA sense region (stab07)
  misc_feature (1)..(1): 5'-3 attached terminal deoxyabasic moiety, inverted abasic, inverted nucleotide or other terminal cap that is optionally present
  misc_feature (21)..(21): 3'-3 attached terminal deoxyabasic moiety, inverted abasic, inverted nucleotide or other terminal cap that is optionally present
  misc_feature (3)..(5): 2'-deoxy-2'Fluoro
  misc_feature (8)..(9): 2'-deoxy-2'Fluoro
  misc_feature (15)..(17): 2'-deoxy-2'Fluoro
  misc_feature (1)..(19): ribonucleotide unmodified or modified as described for this sequence
agcuuggccgggaacccagtt

SEQ ID NO: 2213 - DNA, 21 bp, Artificial Sequence
  Description of Artificial Sequence: Target Sequence/siNA antisense region (stab08)
  misc_feature (1)..(2): 2'-deoxy-2'Fluoro
  misc_feature (3)..(5): 2'-O-methyl
  misc_feature (6)..(10): 2'-deoxy-2'Fluoro
  misc_feature (11)..(12): 2'-O-methyl
  misc_feature (13)..(14): 2'-deoxy-2'Fluoro
  misc_feature (15)..(17): 2'-O-methyl
  misc_feature (18)..(19): 2'-deoxy-2'Fluoro
  misc_feature (20)..(20): Phosphorothioate or Phosphorodithioate 3'-Internucleotide Linkage (optionally present)
  misc_feature (1)..(19): ribonucleotide unmodified or modified as described for this sequence
cuggguucccggccaagcutt

SEQ ID NO: 2214 - DNA, 21 bp, Artificial Sequence
  Description of Artificial Sequence: Target Sequence/siNA sense region (stab09)
  misc_feature (1)..(1): 5'-3 attached terminal deoxyabasic moiety, inverted abasic, inverted nucleotide or other terminal cap that is optionally present
  misc_feature (21)..(21): 3'-3 attached terminal deoxyabasic moiety, inverted abasic, inverted nucleotide or other terminal cap that is optionally present
  misc_feature (1)..(19): ribonucleotide unmodified or modified as described for this sequence
agcuuggccgggaacccagtt

SEQ ID NO: 2215 - DNA, 21 bp, Artificial Sequence
  Description of Artificial Sequence: Target Sequence/siNA antisense region (stab10)
  misc_feature (20)..(20): Phosphorothioate or Phosphorodithioate 3'-Internucleotide Linkage (optionally present)
  misc_feature (1)..(19): ribonucleotide unmodified or modified as described for this sequence
cuggguucccggccaagcutt

SEQ ID NO: 2216 - DNA, 21 bp, Artificial Sequence
  Description of Artificial Sequence: Target Sequence/siNA antisense region (stab19)
  misc_feature (21)..(21): 3'-3 attached terminal deoxyabasic moiety, inverted abasic, inverted nucleotide or other terminal cap that is optionally present
  misc_feature (1)..(2): 2'-deoxy-2'Fluoro
  misc_feature (3)..(5): 2'-O-methyl
  misc_feature (6)..(10): 2'-deoxy-2'Fluoro
  misc_feature (11)..(12): 2'-O-methyl
  misc_feature (13)..(14): 2'-deoxy-2'Fluoro
  misc_feature (15)..(17): 2'-O-methyl
  misc_feature (18)..(19): 2'-deoxy-2'Fluoro
  misc_feature (1)..(19): ribonucleotide unmodified or modified as described for this sequence
cuggguucccggccaagcutt

SEQ ID NO: 2217 - DNA, 21 bp, Artificial Sequence
  Description of Artificial Sequence: Target Sequence/siNA antisense region (stab22)
  misc_feature (21)..(21): 3'-3 attached terminal deoxyabasic moiety, inverted abasic, inverted nucleotide or other terminal cap that is optionally present
  misc_feature (20)..(20): Phosphorothioate or Phosphorodithioate 3'-Internucleotide Linkage (optionally present)
  misc_feature (1)..(19): ribonucleotide unmodified or modified as described for this sequence
cuggguucccggccaagcutt

SEQ ID NO: 2218 - DNA, 21 bp, Artificial Sequence
  Description of Artificial Sequence: Target Sequence/siNA antisense region (stab25)
  misc_feature (4)..(5): 2'-O-methyl
  misc_feature (6)..(10): 2'-deoxy-2'Fluoro
  misc_feature (11)..(12): 2'-O-methyl
  misc_feature (13)..(14): 2'-deoxy-2'Fluoro
  misc_feature (15)..(17): 2'-O-methyl
  misc_feature (18)..(19): 2'-deoxy-2'Fluoro
  misc_feature (20)..(20): Phosphorothioate or Phosphorodithioate 3'-Internucleotide Linkage (optionally present)
  misc_feature (1)..(19): ribonucleotide unmodified or modified as described for this sequence
cuggguucccggccaagcutt

SEQ ID NO: 2219 - RNA, 21 nt, Artificial Sequence
  Description of Artificial Sequence: Target Sequence/siNA antisense region (stab35)
  misc_feature (4)..(5): 2'-O-methyl
  misc_feature (6)..(10): 2'-deoxy-2'Fluoro
  misc_feature (11)..(12): 2'-O-methyl
  misc_feature (13)..(14): 2'-deoxy-2'Fluoro
  misc_feature (15)..(17): 2'-O-methyl
  misc_feature (18)..(19): 2'-deoxy-2'Fluoro
  misc_feature (20)..(21): 2'-O-methyl
cuggguucccggccaagcuuu

SEQ ID NO: 2220 - RNA, 21 nt, Artificial Sequence
  Description of Artificial Sequence: Target Sequence/siNA antisense region (stab36)
  misc_feature (4)..(5): 2'-O-methyl
  misc_feature (6)..(10): 2'-deoxy-2'Fluoro
  misc_feature (11)..(12): 2'-O-methyl
  misc_feature (13)..(14): 2'-deoxy-2'Fluoro
  misc_feature (15)..(17): 2'-O-methyl
  misc_feature (18)..(19): 2'-deoxy-2'Fluoro
  misc_feature (20)..(21): 2'-O-methyl
cuggguucccggccaagcugu

SEQ ID NO: 2221 - RNA, 19 nt, Artificial Sequence
  Description of Artificial Sequence: Target Sequence/siNA sense region
guggacccccuggcccagg

SEQ ID NO: 2222 - RNA, 19 nt, Artificial Sequence
  Description of Artificial Sequence: Target Sequence/siNA antisense region
ccugggccaggggguccac

SEQ ID NO: 2223 - DNA, 21 bp, Artificial Sequence
  Description of Artificial Sequence: Target Sequence/siNA sense region (stab00)
  misc_feature (1)..(19): ribonucleotide unmodified or modified as described for this sequence
guggacccccuggcccaggtt

SEQ ID NO: 2224 - DNA, 21 bp, Artificial Sequence
  Description of Artificial Sequence: Target Sequence/siNA antisense region (stab00as)
  misc_feature (1)..(19): ribonucleotide unmodified or modified as described for this sequence
ccugggccaggggguccactt

SEQ ID NO: 2225 - DNA, 21 bp, Artificial Sequence
  Description of Artificial Sequence: Target Sequence/siNA sense region (stab04)
  misc_feature (1)..(1): 5'-3 attached terminal deoxyabasic moiety, inverted abasic, inverted nucleotide or other terminal cap that is optionally present
  misc_feature (21)..(21): 3'-3 attached terminal deoxyabasic moiety, inverted abasic, inverted nucleotide or other terminal cap that is optionally present
  misc_feature (2)..(2): 2'-deoxy-2'Fluoro
  misc_feature (6)..(11): 2'-deoxy-2'Fluoro
  misc_feature (14)..(16): 2'-deoxy-2'Fluoro
  misc_feature (1)..(19): ribonucleotide unmodified or modified as described for this sequence
guggacccccuggcccaggtt

SEQ ID NO: 2226 - DNA, 21 bp, Artificial Sequence
  Description of Artificial Sequence: Target Sequence/siNA antisense region (stab05)
  misc_feature (1)..(3): 2'-deoxy-2'Fluoro
  misc_feature (7)..(8): 2'-deoxy-2'Fluoro
  misc_feature (15)..(17): 2'-deoxy-2'Fluoro
  misc_feature (19)..(19): 2'-deoxy-2'Fluoro
  misc_feature (20)..(20): Phosphorothioate or Phosphorodithioate 3'-Internucleotide Linkage (optionally present)
  misc_feature (1)..(19): ribonucleotide unmodified or modified as described for this sequence
ccugggccaggggguccactt

SEQ ID NO: 2227 - DNA, 21 bp, Artificial Sequence
  Description of Artificial Sequence: Target Sequence/siNA sense region (stab07)
  misc_feature (1)..(1): 5'-3 attached terminal deoxyabasic moiety, inverted abasic, inverted nucleotide or other terminal cap that is optionally present
  misc_feature (21)..(21): 3'-3 attached terminal deoxyabasic moiety, inverted abasic, inverted nucleotide or other terminal cap that is optionally present
  misc_feature (2)..(2): 2'-deoxy-2'Fluoro
  misc_feature (6)..(11): 2'-deoxy-2'Fluoro
  misc_feature (14)..(16): 2'-deoxy-2'Fluoro
  misc_feature (1)..(19): ribonucleotide unmodified or modified as described for this sequence
guggacccccuggcccaggtt

SEQ ID NO: 2228 - DNA, 21 bp, Artificial Sequence
  Description of Artificial Sequence: Target Sequence/siNA antisense region (stab08)
  misc_feature (1)..(3): 2'-deoxy-2'Fluoro
  misc_feature (4)..(6): 2'-O-methyl
  misc_feature (7)..(8): 2'-deoxy-2'Fluoro
  misc_feature (9)..(14): 2'-O-methyl
  misc_feature (15)..(17): 2'-deoxy-2'Fluoro
  misc_feature (18)..(18): 2'-O-methyl
  misc_feature (19)..(19): 2'-deoxy-2'Fluoro
  misc_feature (20)..(20): Phosphorothioate or Phosphorodithioate 3'-Internucleotide Linkage (optionally present)
  misc_feature (1)..(19): ribonucleotide unmodified or modified as described for this sequence
ccugggccaggggguccactt

SEQ ID NO: 2229 - DNA, 21 bp, Artificial Sequence
  Description of Artificial Sequence: Target Sequence/siNA sense region (stab09)
  misc_feature (1)..(1): 5'-3 attached terminal deoxyabasic moiety, inverted abasic, inverted nucleotide or other terminal cap that is optionally present
  misc_feature (21)..(21): 3'-3 attached terminal deoxyabasic moiety, inverted abasic, inverted nucleotide or other terminal cap that is optionally present
  misc_feature (1)..(19): ribonucleotide unmodified or modified as described for this sequence
guggacccccuggcccaggtt

SEQ ID NO: 2230 - DNA, 21 bp, Artificial Sequence
  Description of Artificial Sequence: Target Sequence/siNA antisense region (stab10)
  misc_feature (20)..(20): Phosphorothioate or Phosphorodithioate 3'-Internucleotide Linkage (optionally present)
  misc_feature (1)..(19): ribonucleotide unmodified or modified as described for this sequence
ccugggccaggggguccactt

SEQ ID NO: 2231 - DNA, 21 bp, Artificial Sequence
  Description of Artificial Sequence: Target Sequence/siNA antisense region (stab19)
  misc_feature (21)..(21): 3'-3 attached terminal deoxyabasic moiety, inverted abasic, inverted nucleotide or other terminal cap that is optionally present
  misc_feature (1)..(3): 2'-deoxy-2'Fluoro
  misc_feature (4)..(6): 2'-O-methyl
  misc_feature (7)..(8): 2'-deoxy-2'Fluoro
  misc_feature (9)..(14): 2'-O-methyl
  misc_feature (15)..(17): 2'-deoxy-2'Fluoro
  misc_feature (18)..(18): 2'-O-methyl
  misc_feature (19)..(19): 2'-deoxy-2'Fluoro
  misc_feature (1)..(19): ribonucleotide unmodified or modified as described for this sequence
ccugggccaggggguccactt

SEQ ID NO: 2232 - DNA, 21 bp, Artificial Sequence
  Description of Artificial Sequence: Target Sequence/siNA antisense region (stab22)
  misc_feature (21)..(21): 3'-3 attached terminal deoxyabasic moiety, inverted abasic, inverted nucleotide or other terminal cap that is optionally present
  misc_feature (20)..(20): Phosphorothioate or Phosphorodithioate 3'-Internucleotide Linkage (optionally present)
  misc_feature (1)..(19): ribonucleotide unmodified or modified as described for this sequence
ccugggccaggggguccactt

SEQ ID NO: 2233 - DNA, 21 bp, Artificial Sequence
  Description of Artificial Sequence: Target Sequence/siNA antisense region (stab25)
  misc_feature (4)..(6): 2'-O-methyl
  misc_feature (7)..(8): 2'-deoxy-2'Fluoro
  misc_feature (9)..(14): 2'-O-methyl
  misc_feature (15)..(17): 2'-deoxy-2'Fluoro
  misc_feature (18)..(18): 2'-O-methyl
  misc_feature (19)..(19): 2'-deoxy-2'Fluoro
  misc_feature (20)..(20): Phosphorothioate or Phosphorodithioate 3'-Internucleotide Linkage (optionally present)
  misc_feature (1)..(19): ribonucleotide unmodified or modified as described for this sequence
ccugggccaggggguccactt

SEQ ID NO: 2234 - RNA, 21 nt, Artificial Sequence
  Description of Artificial Sequence: Target Sequence/siNA antisense region (stab35)
  misc_feature (4)..(6): 2'-O-methyl
  misc_feature (7)..(8): 2'-deoxy-2'Fluoro
  misc_feature (9)..(14): 2'-O-methyl
  misc_feature (15)..(17): 2'-deoxy-2'Fluoro
  misc_feature (18)..(18): 2'-O-methyl
  misc_feature (19)..(19): 2'-deoxy-2'Fluoro
  misc_feature (20)..(21): 2'-O-methyl
ccugggccaggggguccacuu

SEQ ID NO: 2235 - RNA, 21 nt, Artificial Sequence
  Description of Artificial Sequence: Target Sequence/siNA antisense region (stab36)
  misc_feature (4)..(6): 2'-O-methyl
  misc_feature (7)..(8): 2'-deoxy-2'Fluoro
  misc_feature (9)..(14): 2'-O-methyl
  misc_feature (15)..(17): 2'-deoxy-2'Fluoro
  misc_feature (18)..(18): 2'-O-methyl
  misc_feature (19)..(19): 2'-deoxy-2'Fluoro
  misc_feature (20)..(21): 2'-O-methyl
ccugggccaggggguccacug

SEQ ID NO: 2236 - RNA, 19 nt, Artificial Sequence
  Description of Artificial Sequence: Target Sequence/siNA sense region
gugacucagcuauuccggg

SEQ ID NO: 2237 - RNA, 19 nt, Artificial Sequence
  Description of Artificial Sequence: Target Sequence/siNA antisense region
cccggaauagcugagucac

SEQ ID NO: 2238 - DNA, 21 bp, Artificial Sequence
  Description of Artificial Sequence: Target Sequence/siNA sense region (stab00)
  misc_feature (1)..(19): ribonucleotide unmodified or modified as described for this sequence
gugacucagcuauuccgggtt

SEQ ID NO: 2239 - DNA, 21 bp, Artificial Sequence
  Description of Artificial Sequence: Target Sequence/siNA antisense region (stab00as)
  misc_feature (1)..(19): ribonucleotide unmodified or modified as described for this sequence
cccggaauagcugagucactt

SEQ ID NO: 2240 - DNA, 21 bp, Artificial Sequence
  Description of Artificial Sequence: Target Sequence/siNA sense region (stab04)
  misc_feature (1)..(1): 5'-3 attached terminal deoxyabasic moiety, inverted abasic, inverted nucleotide or other terminal cap that is optionally present
  misc_feature (21)..(21): 3'-3 attached terminal deoxyabasic moiety, inverted abasic, inverted nucleotide or other terminal cap that is optionally present
  misc_feature (2)..(2): 2'-deoxy-2'Fluoro
  misc_feature (5)..(7): 2'-deoxy-2'Fluoro
  misc_feature (10)..(11): 2'-deoxy-2'Fluoro
  misc_feature (13)..(16): 2'-deoxy-2'Fluoro
  misc_feature (1)..(19): ribonucleotide unmodified or modified as described for this sequence
gugacucagcuauuccgggtt

SEQ ID NO: 2241 - DNA, 21 bp, Artificial Sequence
  Description of Artificial Sequence: Target Sequence/siNA antisense region (stab05)
  misc_feature (1)..(3): 2'-deoxy-2'Fluoro
  misc_feature (8)..(8): 2'-deoxy-2'Fluoro
  misc_feature (11)..(12): 2'-deoxy-2'Fluoro
  misc_feature (16)..(17): 2'-deoxy-2'Fluoro
  misc_feature (19)..(19): 2'-deoxy-2'Fluoro
  misc_feature (20)..(20): Phosphorothioate or Phosphorodithioate 3'-Internucleotide Linkage (optionally present)
  misc_feature (1)..(19): ribonucleotide unmodified or modified as described for this sequence
cccggaauagcugagucactt

SEQ ID NO: 2242 - DNA, 21 bp, Artificial Sequence
  Description of Artificial Sequence: Target Sequence/siNA sense region (stab07)
  misc_feature (1)..(1): 5'-3 attached terminal deoxyabasic moiety, inverted abasic, inverted nucleotide or other terminal cap that is optionally present
  misc_feature (21)..(21): 3'-3 attached terminal deoxyabasic moiety, inverted abasic, inverted nucleotide or other terminal cap that is optionally present
  misc_feature (2)..(2): 2'-deoxy-2'Fluoro
  misc_feature (5)..(7): 2'-deoxy-2'Fluoro
  misc_feature (10)..(11): 2'-deoxy-2'Fluoro
  misc_feature (13)..(16): 2'-deoxy-2'Fluoro
  misc_feature (1)..(19): ribonucleotide unmodified or modified as described for this sequence
gugacucagcuauuccgggtt

SEQ ID NO: 2243 - DNA, 21 bp, Artificial Sequence
  Description of Artificial Sequence: Target Sequence/siNA antisense region (stab08)
  misc_feature (1)..(3): 2'-deoxy-2'Fluoro
  misc_feature (4)..(7): 2'-O-methyl
  misc_feature (8)..(8): 2'-deoxy-2'Fluoro
  misc_feature (9)..(10): 2'-O-methyl
  misc_feature (11)..(12): 2'-deoxy-2'Fluoro
  misc_feature (13)..(15): 2'-O-methyl
  misc_feature (16)..(17): 2'-deoxy-2'Fluoro
  misc_feature (18)..(18): 2'-O-methyl
  misc_feature (19)..(19): 2'-deoxy-2'Fluoro
  misc_feature (20)..(20): Phosphorothioate or Phosphorodithioate 3'-Internucleotide Linkage (optionally present)
  misc_feature (1)..(19): ribonucleotide unmodified or modified as described for this sequence
cccggaauagcugagucactt

SEQ ID NO: 2244 - DNA, 21 bp, Artificial Sequence
  Description of Artificial Sequence: Target Sequence/siNA sense region (stab09)
  misc_feature (1)..(1): 5'-3 attached terminal deoxyabasic moiety, inverted abasic, inverted nucleotide or other terminal cap that is optionally present
  misc_feature (21)..(21): 3'-3 attached terminal deoxyabasic moiety, inverted abasic, inverted nucleotide or other terminal cap that is optionally present
  misc_feature (1)..(19): ribonucleotide unmodified or modified as described for this sequence
gugacucagcuauuccgggtt

SEQ ID NO: 2245 - DNA, 21 bp, Artificial Sequence
  Description of Artificial Sequence: Target Sequence/siNA antisense region (stab10)
  misc_feature (20)..(20): Phosphorothioate or Phosphorodithioate 3'-Internucleotide Linkage (optionally present)
  misc_feature (1)..(19): ribonucleotide unmodified or modified as described for this sequence
cccggaauagcugagucactt

SEQ ID NO: 2246 - DNA, 21 bp, Artificial Sequence
  Description of Artificial Sequence: Target Sequence/siNA antisense region (stab19)
  misc_feature (21)..(21): 3'-3 attached terminal deoxyabasic moiety, inverted abasic, inverted nucleotide or other terminal cap that is optionally present
  misc_feature (1)..(3): 2'-deoxy-2'Fluoro
  misc_feature (4)..(7): 2'-O-methyl
  misc_feature (8)..(8): 2'-deoxy-2'Fluoro
  misc_feature (9)..(10): 2'-O-methyl
  misc_feature (11)..(12): 2'-deoxy-2'Fluoro
  misc_feature (13)..(15): 2'-O-methyl
  misc_feature (16)..(17): 2'-deoxy-2'Fluoro
  misc_feature (18)..(18): 2'-O-methyl
  misc_feature (19)..(19): 2'-deoxy-2'Fluoro
  misc_feature (1)..(19): ribonucleotide unmodified or modified as described for this sequence
cccggaauagcugagucactt

SEQ ID NO: 2247 - DNA, 21 bp, Artificial Sequence
  Description of Artificial Sequence: Target Sequence/siNA antisense region (stab22)
  misc_feature (21)..(21): 3'-3 attached terminal deoxyabasic moiety, inverted abasic, inverted nucleotide or other terminal cap that is optionally present
  misc_feature (20)..(20): Phosphorothioate or Phosphorodithioate 3'-Internucleotide Linkage (optionally present)
  misc_feature (1)..(19): ribonucleotide unmodified or modified as described for this sequence
cccggaauagcugagucactt

SEQ ID NO: 2248 - DNA, 21 bp, Artificial Sequence
  Description of Artificial Sequence: Target Sequence/siNA antisense region (stab25)
  misc_feature (4)..(7): 2'-O-methyl
  misc_feature (8)..(8): 2'-deoxy-2'Fluoro
  misc_feature (9)..(10): 2'-O-methyl
  misc_feature (11)..(12): 2'-deoxy-2'Fluoro
  misc_feature (13)..(15): 2'-O-methyl
  misc_feature (16)..(17): 2'-deoxy-2'Fluoro
  misc_feature (18)..(18): 2'-O-methyl
  misc_feature (19)..(19): 2'-deoxy-2'Fluoro
  misc_feature (20)..(20): Phosphorothioate or Phosphorodithioate 3'-Internucleotide Linkage (optionally present)
  misc_feature (1)..(19): ribonucleotide unmodified or modified as described for this sequence
cccggaauagcugagucactt

SEQ ID NO: 2249 - RNA, 21 nt, Artificial Sequence
  Description of Artificial Sequence: Target Sequence/siNA antisense region (stab35)
  misc_feature (4)..(7): 2'-O-methyl
  misc_feature (8)..(8): 2'-deoxy-2'Fluoro
  misc_feature (9)..(10): 2'-O-methyl
  misc_feature (11)..(12): 2'-deoxy-2'Fluoro
  misc_feature (13)..(15): 2'-O-methyl
  misc_feature (16)..(17): 2'-deoxy-2'Fluoro
  misc_feature (18)..(18): 2'-O-methyl
  misc_feature (19)..(19): 2'-deoxy-2'Fluoro
  misc_feature (20)..(21): 2'-O-methyl
cccggaauagcugagucacuu

SEQ ID NO: 2250 - RNA, 21 nt, Artificial Sequence
  Description of Artificial Sequence: Target Sequence/siNA antisense region (stab36)
  misc_feature (4)..(7): 2'-O-methyl
  misc_feature (8)..(8): 2'-deoxy-2'Fluoro
  misc_feature (9)..(10): 2'-O-methyl
  misc_feature (11)..(12): 2'-deoxy-2'Fluoro
  misc_feature (13)..(15): 2'-O-methyl
  misc_feature (16)..(17): 2'-deoxy-2'Fluoro
  misc_feature (18)..(18): 2'-O-methyl
  misc_feature (19)..(19): 2'-deoxy-2'Fluoro
  misc_feature (20)..(21): 2'-O-methyl
cccggaauagcugagucaccu

SEQ ID NO: 2251 - RNA, 19 nt, Artificial Sequence
  Description of Artificial Sequence: Target Sequence/siNA sense region
gaacaucucuuagagcgag

SEQ ID NO: 2252 - RNA, 19 nt, Artificial Sequence
  Description of Artificial Sequence: Target Sequence/siNA antisense region
cucgcucuaagagauguuc

SEQ ID NO: 2253 - DNA, 21 bp, Artificial Sequence
  Description of Artificial Sequence: Target Sequence/siNA sense region (stab00)
  misc_feature (1)..(19): ribonucleotide unmodified or modified as described for this sequence
gaacaucucuuagagcgagtt

SEQ ID NO: 2254 - DNA, 21 bp, Artificial Sequence
  Description of Artificial Sequence: Target Sequence/siNA antisense region (stab00as)
  misc_feature (1)..(19): ribonucleotide unmodified or modified as described for this sequence
cucgcucuaagagauguuctt

SEQ ID NO: 2255 - DNA, 21 bp, Artificial Sequence
  Description of Artificial Sequence: Target Sequence/siNA sense region (stab04)
  misc_feature (1)..(1): 5'-3 attached terminal deoxyabasic moiety, inverted abasic, inverted nucleotide or other terminal cap that is optionally present
  misc_feature (21)..(21): 3'-3 attached terminal deoxyabasic moiety, inverted abasic, inverted nucleotide or other terminal cap that is optionally present
  misc_feature (4)..(4): 2'-deoxy-2'Fluoro
  misc_feature (6)..(11): 2'-deoxy-2'Fluoro
  misc_feature (16)..(16): 2'-deoxy-2'Fluoro
  misc_feature (1)..(19): ribonucleotide unmodified or modified as described for this sequence
gaacaucucuuagagcgagtt

SEQ ID NO: 2256 - DNA, 21 bp, Artificial Sequence
  Description of Artificial Sequence: Target Sequence/siNA antisense region (stab05)
  misc_feature (1)..(3): 2'-deoxy-2'Fluoro
  misc_feature (5)..(8): 2'-deoxy-2'Fluoro
  misc_feature (15)..(15): 2'-deoxy-2'Fluoro
  misc_feature (17)..(19): 2'-deoxy-2'Fluoro
  misc_feature (20)..(20): Phosphorothioate or Phosphorodithioate 3'-Internucleotide Linkage (optionally present)
  misc_feature (1)..(19): ribonucleotide unmodified or modified as described for this sequence
cucgcucuaagagauguuctt

SEQ ID NO: 2257 - DNA, 21 bp, Artificial Sequence
  Description of Artificial Sequence: Target Sequence/siNA sense region (stab07)
  misc_feature (1)..(1): 5'-3 attached terminal deoxyabasic moiety, inverted abasic, inverted nucleotide or other terminal cap that is optionally present
  misc_feature (21)..(21): 3'-3 attached terminal deoxyabasic moiety, inverted abasic, inverted nucleotide or other terminal cap that is optionally present
  misc_feature (4)..(4): 2'-deoxy-2'Fluoro
  misc_feature (6)..(11): 2'-deoxy-2'Fluoro
  misc_feature (16)..(16): 2'-deoxy-2'Fluoro
  misc_feature (1)..(19): ribonucleotide unmodified or modified as described for this sequence
gaacaucucuuagagcgagtt

SEQ ID NO: 2258 - DNA, 21 bp, Artificial Sequence
  Description of Artificial Sequence: Target Sequence/siNA antisense region (stab08)
  misc_feature (1)..(3): 2'-deoxy-2'Fluoro
  misc_feature (4)..(4): 2'-O-methyl
  misc_feature (5)..(8): 2'-deoxy-2'Fluoro
  misc_feature (9)..(14): 2'-O-methyl
  misc_feature (15)..(15): 2'-deoxy-2'Fluoro
  misc_feature (16)..(16): 2'-O-methyl
  misc_feature (17)..(19): 2'-deoxy-2'Fluoro
  misc_feature (20)..(20): Phosphorothioate or Phosphorodithioate 3'-Internucleotide Linkage (optionally present)
  misc_feature (1)..(19): ribonucleotide unmodified or modified as described for this sequence
cucgcucuaagagauguuctt

SEQ ID NO: 2259 - DNA, 21 bp, Artificial Sequence
  Description of Artificial Sequence: Target Sequence/siNA sense region (stab09)
  misc_feature (1)..(1): 5'-3 attached terminal deoxyabasic moiety, inverted abasic, inverted nucleotide or other terminal cap that is optionally present
  misc_feature (21)..(21): 3'-3 attached terminal deoxyabasic moiety, inverted abasic, inverted nucleotide or other terminal cap that is optionally present
  misc_feature (1)..(19): ribonucleotide unmodified or modified as described for this sequence
gaacaucucuuagagcgagtt

SEQ ID NO: 2260 - DNA, 21 bp, Artificial Sequence
  Description of Artificial Sequence: Target Sequence/siNA antisense region (stab10)
  misc_feature (20)..(20): Phosphorothioate or Phosphorodithioate 3'-Internucleotide Linkage (optionally present)
  misc_feature (1)..(19): ribonucleotide unmodified or modified as described for this sequence
cucgcucuaagagauguuctt

SEQ ID NO: 2261 - DNA, 21 bp, Artificial Sequence
  Description of Artificial Sequence: Target Sequence/siNA antisense region (stab19)
  misc_feature (21)..(21): 3'-3 attached terminal deoxyabasic moiety, inverted abasic, inverted nucleotide or other terminal cap that is optionally present
  misc_feature (1)..(3): 2'-deoxy-2'Fluoro
  misc_feature (4)..(4): 2'-O-methyl
  misc_feature (5)..(8): 2'-deoxy-2'Fluoro
  misc_feature (9)..(14): 2'-O-methyl
  misc_feature (15)..(15): 2'-deoxy-2'Fluoro
  misc_feature (16)..(16): 2'-O-methyl
  misc_feature (17)..(19): 2'-deoxy-2'Fluoro
  misc_feature (1)..(19): ribonucleotide unmodified or modified as described for this sequence
cucgcucuaagagauguuctt

SEQ ID NO: 2262 - DNA, 21 bp, Artificial Sequence
  Description of Artificial Sequence: Target Sequence/siNA antisense region (stab22)
  misc_feature (21)..(21): 3'-3 attached terminal deoxyabasic moiety, inverted abasic, inverted nucleotide or other terminal cap that is optionally present
  misc_feature (20)..(20): Phosphorothioate or Phosphorodithioate 3'-Internucleotide Linkage (optionally present)
  misc_feature (1)..(19): ribonucleotide unmodified or modified as described for this sequence
cucgcucuaagagauguuctt

SEQ ID NO: 2263 - DNA, 21 bp, Artificial Sequence
  Description of Artificial Sequence: Target Sequence/siNA antisense region (stab25)
  misc_feature (4)..(4): 2'-O-methyl
  misc_feature (5)..(8): 2'-deoxy-2'Fluoro
  misc_feature (9)..(14): 2'-O-methyl
  misc_feature (15)..(15): 2'-deoxy-2'Fluoro
  misc_feature (16)..(16): 2'-O-methyl
  misc_feature (17)..(19): 2'-deoxy-2'Fluoro
  misc_feature (20)..(20): Phosphorothioate or Phosphorodithioate 3'-Internucleotide Linkage (optionally present)
  misc_feature (1)..(19): ribonucleotide unmodified or modified as described for this sequence
cucgcucuaagagauguuctt

SEQ ID NO: 2264 - RNA, 21 nt, Artificial Sequence
  Description of Artificial Sequence: Target Sequence/siNA antisense region (stab35)
  misc_feature (4)..(4): 2'-O-methyl
  misc_feature (5)..(8): 2'-deoxy-2'Fluoro
  misc_feature (9)..(14): 2'-O-methyl
  misc_feature (15)..(15): 2'-deoxy-2'Fluoro
  misc_feature (16)..(16): 2'-O-methyl
  misc_feature (17)..(19): 2'-deoxy-2'Fluoro
  misc_feature (20)..(21): 2'-O-methyl
cucgcucuaagagauguucuu

SEQ ID NO: 2265 - RNA, 21 nt, Artificial Sequence
  Description of Artificial Sequence: Target Sequence/siNA antisense region (stab36)
  misc_feature (4)..(4): 2'-O-methyl
  misc_feature (5)..(8): 2'-deoxy-2'Fluoro
  misc_feature (9)..(14): 2'-O-methyl
  misc_feature (15)..(15): 2'-deoxy-2'Fluoro
  misc_feature (16)..(16): 2'-O-methyl
  misc_feature (17)..(19): 2'-deoxy-2'Fluoro
  misc_feature (20)..(21): 2'-O-methyl
cucgcucuaagagauguuccc

SEQ ID NO: 2266 - RNA, 19 nt, Artificial Sequence
  Description of Artificial Sequence: Target Sequence/siNA sense region
gcacugaacugugugaccc

SEQ ID NO: 2267 - RNA, 19 nt, Artificial Sequence
  Description of Artificial Sequence: Target Sequence/siNA antisense region
gggucacacaguucagugc

SEQ ID NO: 2268 - DNA, 21 bp, Artificial Sequence
  Description of Artificial Sequence: Target Sequence/siNA sense region (stab00)
  misc_feature (1)..(19): ribonucleotide unmodified or modified as described for this sequence
gcacugaacugugugaccctt

SEQ ID NO: 2269 - DNA, 21 bp, Artificial Sequence
  Description of Artificial Sequence: Target Sequence/siNA antisense region (stab00as)
  misc_feature (1)..(19): ribonucleotide unmodified or modified as described for this sequence
gggucacacaguucagugctt

SEQ ID NO: 2270 - DNA, 21 bp, Artificial Sequence
  Description of Artificial Sequence: Target Sequence/siNA sense region (stab04)
  misc_feature (1)..(1): 5'-3 attached terminal deoxyabasic moiety, inverted abasic, inverted nucleotide or other terminal cap that is optionally present
  misc_feature (21)..(21): 3'-3 attached terminal deoxyabasic moiety, inverted abasic, inverted nucleotide or other terminal cap that is optionally present
  misc_feature (2)..(2): 2'-deoxy-2'Fluoro
  misc_feature (4)..(5): 2'-deoxy-2'Fluoro
  misc_feature (9)..(10): 2'-deoxy-2'Fluoro
  misc_feature (12)..(12): 2'-deoxy-2'Fluoro
  misc_feature (14)..(14): 2'-deoxy-2'Fluoro
  misc_feature (17)..(19): 2'-deoxy-2'Fluoro
  misc_feature (1)..(19): ribonucleotide unmodified or modified as described for this sequence
gcacugaacugugugaccctt

SEQ ID NO: 2271 - DNA, 21 bp, Artificial Sequence
  Description of Artificial Sequence: Target Sequence/siNA antisense region (stab05)
  misc_feature (4)..(5): 2'-deoxy-2'Fluoro
  misc_feature (7)..(7): 2'-deoxy-2'Fluoro
  misc_feature (9)..(9): 2'-deoxy-2'Fluoro
  misc_feature (12)..(14): 2'-deoxy-2'Fluoro
  misc_feature (17)..(17): 2'-deoxy-2'Fluoro
  misc_feature (19)..(19): 2'-deoxy-2'Fluoro
  misc_feature (20)..(20): Phosphorothioate or Phosphorodithioate 3'-Internucleotide Linkage (optionally present)
  misc_feature (1)..(19): ribonucleotide unmodified or modified as described for this sequence
gggucacacaguucagugctt

SEQ ID NO: 2272 - DNA, 21 bp, Artificial Sequence
  Description of Artificial Sequence: Target Sequence/siNA sense region (stab07)
  misc_feature (1)..(1): 5'-3 attached terminal deoxyabasic moiety, inverted abasic, inverted nucleotide or other terminal cap that is optionally present
  misc_feature (21)..(21): 3'-3 attached terminal deoxyabasic moiety, inverted abasic, inverted nucleotide or other terminal cap that is optionally present
  misc_feature (2)..(2): 2'-deoxy-2'Fluoro
  misc_feature (4)..(5): 2'-deoxy-2'Fluoro
  misc_feature (9)..(10): 2'-deoxy-2'Fluoro
  misc_feature (12)..(12): 2'-deoxy-2'Fluoro
  misc_feature (14)..(14): 2'-deoxy-2'Fluoro
  misc_feature (17)..(19): 2'-deoxy-2'Fluoro
  misc_feature (1)..(19): ribonucleotide unmodified or modified as described for this sequence
gcacugaacugugugaccctt

SEQ ID NO: 2273 - DNA, 21 bp, Artificial Sequence
  Description of Artificial Sequence: Target Sequence/siNA antisense region (stab08)
  misc_feature (1)..(3): 2'-O-methyl
  misc_feature (4)..(5): 2'-deoxy-2'Fluoro
  misc_feature (6)..(6): 2'-O-methyl
  misc_feature (7)..(7): 2'-deoxy-2'Fluoro
  misc_feature (8)..(8): 2'-O-methyl
  misc_feature (9)..(9): 2'-deoxy-2'Fluoro
  misc_feature (10)..(11): 2'-O-methyl
  misc_feature (12)..(14): 2'-deoxy-2'Fluoro
  misc_feature (15)..(16): 2'-O-methyl
  misc_feature (17)..(17): 2'-deoxy-2'Fluoro
  misc_feature (18)..(18): 2'-O-methyl
  misc_feature (19)..(19): 2'-deoxy-2'Fluoro
  misc_feature (20)..(20): Phosphorothioate or Phosphorodithioate 3'-Internucleotide Linkage (optionally present)
  misc_feature (1)..(19): ribonucleotide unmodified or modified as described for this sequence
gggucacacaguucagugctt

SEQ ID NO: 2274 - DNA, 21 bp, Artificial Sequence
  Description of Artificial Sequence: Target Sequence/siNA sense region (stab09)
  misc_feature (1)..(1): 5'-3 attached terminal deoxyabasic moiety, inverted abasic, inverted nucleotide or other terminal cap that is optionally present
  misc_feature (21)..(21): 3'-3 attached terminal deoxyabasic moiety, inverted abasic, inverted nucleotide or other terminal cap that is optionally present
  misc_feature (1)..(19): ribonucleotide unmodified or modified as described for this sequence
gcacugaacugugugaccctt

SEQ ID NO: 2275 - DNA, 21 bp, Artificial Sequence
  Description of Artificial Sequence: Target Sequence/siNA antisense region (stab10)
  misc_feature (20)..(20): Phosphorothioate or Phosphorodithioate 3'-Internucleotide Linkage (optionally present)
  misc_feature (1)..(19): ribonucleotide unmodified or modified as described for this sequence
gggucacacaguucagugctt

SEQ ID NO: 2276 - DNA, 21 bp, Artificial Sequence
  Description of Artificial Sequence: Target Sequence/siNA antisense region (stab19)
  misc_feature (21)..(21): 3'-3 attached terminal deoxyabasic moiety, inverted abasic, inverted nucleotide or other terminal cap that is optionally present
  misc_feature (1)..(3): 2'-O-methyl
  misc_feature (4)..(5): 2'-deoxy-2'Fluoro
  misc_feature (6)..(6): 2'-O-methyl
  misc_feature (7)..(7): 2'-deoxy-2'Fluoro
  misc_feature (8)..(8): 2'-O-methyl
  misc_feature (9)..(9): 2'-deoxy-2'Fluoro
  misc_feature (10)..(11): 2'-O-methyl
  misc_feature (12)..(14): 2'-deoxy-2'Fluoro
  misc_feature (15)..(16): 2'-O-methyl
  misc_feature (17)..(17): 2'-deoxy-2'Fluoro
  misc_feature (18)..(18): 2'-O-methyl
  misc_feature (19)..(19): 2'-deoxy-2'Fluoro
  misc_feature (1)..(19): ribonucleotide unmodified or modified as described for this sequence
gggucacacaguucagugctt

SEQ ID NO: 2277 - DNA, 21 bp, Artificial Sequence
  Description of Artificial Sequence: Target Sequence/siNA antisense region (stab22)
  misc_feature (21)..(21): 3'-3 attached terminal deoxyabasic moiety, inverted abasic, inverted nucleotide or other terminal cap that is optionally present
  misc_feature (20)..(20): Phosphorothioate or Phosphorodithioate 3'-Internucleotide Linkage (optionally present)
  misc_feature (1)..(19): ribonucleotide unmodified or modified as described for this sequence
gggucacacaguucagugctt

SEQ ID NO: 2278 - DNA, 21 bp, Artificial Sequence
  Description of Artificial Sequence: Target Sequence/siNA antisense region (stab25)
  misc_feature (4)..(5): 2'-deoxy-2'Fluoro
  misc_feature (6)..(6): 2'-O-methyl
  misc_feature (7)..(7): 2'-deoxy-2'Fluoro
  misc_feature (8)..(8): 2'-O-methyl
  misc_feature (9)..(9): 2'-deoxy-2'Fluoro
  misc_feature (10)..(11): 2'-O-methyl
  misc_feature (12)..(14): 2'-deoxy-2'Fluoro
  misc_feature (15)..(16): 2'-O-methyl
  misc_feature (17)..(17): 2'-deoxy-2'Fluoro
  misc_feature (18)..(18): 2'-O-methyl
  misc_feature (19)..(19): 2'-deoxy-2'Fluoro
  misc_feature (20)..(20): Phosphorothioate or Phosphorodithioate 3'-Internucleotide Linkage (optionally present)
  misc_feature (1)..(19): ribonucleotide unmodified or modified as described for this sequence
gggucacacaguucagugctt

SEQ ID NO: 2279 - RNA, 21 nt, Artificial Sequence
  Description of Artificial Sequence: Target Sequence/siNA antisense region (stab35)
  misc_feature (4)..(5): 2'-deoxy-2'Fluoro
  misc_feature (6)..(6): 2'-O-methyl
  misc_feature (7)..(7): 2'-deoxy-2'Fluoro
  misc_feature (8)..(8): 2'-O-methyl
  misc_feature (9)..(9): 2'-deoxy-2'Fluoro
  misc_feature (10)..(11): 2'-O-methyl
  misc_feature (12)..(14): 2'-deoxy-2'Fluoro
  misc_feature (15)..(16): 2'-O-methyl
  misc_feature (17)..(17): 2'-deoxy-2'Fluoro
  misc_feature (18)..(18): 2'-O-methyl
  misc_feature (19)..(19): 2'-deoxy-2'Fluoro
  misc_feature (20)..(21): 2'-O-methyl
gggucacacaguucagugcuu

SEQ ID NO: 2280 - RNA, 21 nt, Artificial Sequence
  Description of Artificial Sequence: Target Sequence/siNA antisense region (stab36)
  misc_feature (4)..(5): 2'-deoxy-2'Fluoro
  misc_feature (6)..(6): 2'-O-methyl
  misc_feature (7)..(7): 2'-deoxy-2'Fluoro
  misc_feature (8)..(8): 2'-O-methyl
  misc_feature (9)..(9): 2'-deoxy-2'Fluoro
  misc_feature (10)..(11): 2'-O-methyl
  misc_feature (12)..(14): 2'-deoxy-2'Fluoro
  misc_feature (15)..(16): 2'-O-methyl
  misc_feature (17)..(17): 2'-deoxy-2'Fluoro
  misc_feature (18)..(18): 2'-O-methyl
  misc_feature (19)..(19): 2'-deoxy-2'Fluoro
  misc_feature (20)..(21): 2'-O-methyl
gggucacacaguucagugcuc

SEQ ID NO: 2281 - RNA, 19 nt, Artificial Sequence
  Description of Artificial Sequence: Target Sequence/siNA sense region
cagcccaaccccagcccug

SEQ ID NO: 2282 - RNA, 19 nt, Artificial Sequence
  Description of Artificial Sequence: Target Sequence/siNA antisense region
cagggcugggguugggcug

SEQ ID NO: 2283 - DNA, 21 bp, Artificial Sequence
  Description of Artificial Sequence: Target Sequence/siNA sense region (stab00)
  misc_feature (1)..(19): ribonucleotide unmodified or modified as described for this sequence
cagcccaaccccagcccugtt

SEQ ID NO: 2284 - DNA, 21 bp, Artificial Sequence
  Description of Artificial Sequence: Target Sequence/siNA antisense region (stab00as)
  misc_feature (1)..(19): ribonucleotide unmodified or modified as described for this sequence
cagggcugggguugggcugtt

SEQ ID NO: 2285 - DNA, 21 bp, Artificial Sequence
  Description of Artificial Sequence: Target Sequence/siNA sense region (stab04)
  misc_feature (1)..(1): 5'-3 attached terminal deoxyabasic moiety, inverted abasic, inverted nucleotide or other terminal cap that is optionally present
  misc_feature (21)..(21): 3'-3 attached terminal deoxyabasic moiety, inverted abasic, inverted nucleotide or other terminal cap that is optionally present
  misc_feature (1)..(1): 2'-deoxy-2'Fluoro
  misc_feature (4)..(6): 2'-deoxy-2'Fluoro
  misc_feature (9)..(12): 2'-deoxy-2'Fluoro
  misc_feature (15)..(18): 2'-deoxy-2'Fluoro
  misc_feature (1)..(19): ribonucleotide unmodified or modified as described for this sequence
cagcccaaccccagcccugtt

SEQ ID NO: 2286 - DNA, 21 bp, Artificial Sequence
  Description of Artificial Sequence: Target Sequence/siNA antisense region (stab05)
  misc_feature (1)..(1): 2'-deoxy-2'Fluoro
  misc_feature (6)..(7): 2'-deoxy-2'Fluoro
  misc_feature (12)..(13): 2'-deoxy-2'Fluoro
  misc_feature (17)..(18): 2'-deoxy-2'Fluoro
  misc_feature (20)..(20): Phosphorothioate or Phosphorodithioate 3'-Internucleotide Linkage (optionally present)
  misc_feature (1)..(19): ribonucleotide unmodified or modified as described for this sequence
cagggcugggguugggcugtt

SEQ ID NO: 2287 - DNA, 21 bp, Artificial Sequence
  Description of Artificial Sequence: Target Sequence/siNA sense region (stab07)
  misc_feature (1)..(1): 5'-3 attached terminal deoxyabasic moiety, inverted abasic, inverted nucleotide or other terminal cap that is optionally present
  misc_feature (21)..(21): 3'-3 attached terminal deoxyabasic moiety, inverted abasic, inverted nucleotide or other terminal cap that is optionally present
  misc_feature (1)..(1): 2'-deoxy-2'Fluoro
  misc_feature (4)..(6): 2'-deoxy-2'Fluoro
  misc_feature (9)..(12): 2'-deoxy-2'Fluoro
  misc_feature (15)..(18): 2'-deoxy-2'Fluoro
  misc_feature (1)..(19): ribonucleotide unmodified or modified as described for this sequence
cagcccaaccccagcccugtt

SEQ ID NO: 2288 - DNA, 21 bp, Artificial Sequence
  Description of Artificial Sequence: Target Sequence/siNA antisense region (stab08)
  misc_feature (1)..(1): 2'-deoxy-2'Fluoro
  misc_feature (2)..(5): 2'-O-methyl
  misc_feature (6)..(7): 2'-deoxy-2'Fluoro
  misc_feature (8)..(11): 2'-O-methyl
  misc_feature (12)..(13): 2'-deoxy-2'Fluoro
  misc_feature (14)..(16): 2'-O-methyl
  misc_feature (17)..(18): 2'-deoxy-2'Fluoro
  misc_feature (19)..(19): 2'-O-methyl
  misc_feature (20)..(20): Phosphorothioate or Phosphorodithioate 3'-Internucleotide Linkage (optionally present)
  misc_feature (1)..(19): ribonucleotide unmodified or modified as described for this sequence
cagggcugggguugggcugtt

SEQ ID NO: 2289 - DNA, 21 bp, Artificial Sequence
  Description of Artificial Sequence: Target Sequence/siNA sense region (stab09)
  misc_feature (1)..(1): 5'-3 attached terminal deoxyabasic moiety, inverted abasic, inverted nucleotide or other terminal cap that is optionally present
  misc_feature (21)..(21): 3'-3 attached terminal deoxyabasic moiety, inverted abasic, inverted nucleotide or other terminal cap that is optionally present
  misc_feature (1)..(19): ribonucleotide unmodified or modified as described for this sequence
cagcccaaccccagcccugtt

SEQ ID NO: 2290 - DNA, 21 bp, Artificial Sequence
  Description of Artificial Sequence: Target Sequence/siNA antisense region (stab10)
  misc_feature (20)..(20): Phosphorothioate or Phosphorodithioate 3'-Internucleotide Linkage (optionally present)
  misc_feature (1)..(19): ribonucleotide unmodified or modified as described for this sequence
cagggcugggguugggcugtt

SEQ ID NO: 2291 - DNA, 21 bp, Artificial Sequence
  Description of Artificial Sequence: Target Sequence/siNA antisense region (stab19)
  misc_feature (21)..(21): 3'-3 attached terminal deoxyabasic moiety, inverted abasic, inverted nucleotide or other terminal cap that is optionally present
  misc_feature (1)..(1): 2'-deoxy-2'Fluoro
  misc_feature (2)..(5): 2'-O-methyl
  misc_feature (6)..(7): 2'-deoxy-2'Fluoro
  misc_feature (8)..(11): 2'-O-methyl
  misc_feature (12)..(13): 2'-deoxy-2'Fluoro
  misc_feature (14)..(16): 2'-O-methyl
  misc_feature (17)..(18): 2'-deoxy-2'Fluoro
  misc_feature (19)..(19): 2'-O-methyl
  misc_feature (1)..(19): ribonucleotide unmodified or modified as described for this sequence
cagggcugggguugggcugtt

SEQ ID NO: 2292 - DNA, 21 bp, Artificial Sequence
  Description of Artificial Sequence: Target Sequence/siNA antisense region (stab22)
  misc_feature (21)..(21): 3'-3 attached terminal deoxyabasic moiety, inverted abasic, inverted nucleotide or other terminal cap that is optionally present
  misc_feature (20)..(20): Phosphorothioate or Phosphorodithioate 3'-Internucleotide Linkage (optionally present)
  misc_feature (1)..(19): ribonucleotide unmodified or modified as described for this sequence
cagggcugggguugggcugtt

SEQ ID NO: 2293 - DNA, 21 bp, Artificial Sequence
  Description of Artificial Sequence: Target Sequence/siNA antisense region (stab25)
  misc_feature (4)..(5): 2'-O-methyl
  misc_feature (6)..(7): 2'-deoxy-2'Fluoro
  misc_feature (8)..(11): 2'-O-methyl
  misc_feature (12)..(13): 2'-deoxy-2'Fluoro
  misc_feature (14)..(16): 2'-O-methyl
  misc_feature (17)..(18): 2'-deoxy-2'Fluoro
  misc_feature (19)..(19): 2'-O-methyl
  misc_feature (20)..(20): Phosphorothioate or Phosphorodithioate 3'-Internucleotide Linkage (optionally present)
  misc_feature (1)..(19): ribonucleotide unmodified or modified as described for this sequence
cagggcugggguugggcugtt

SEQ ID NO: 2294 - RNA, 21 nt, Artificial Sequence
  Description of Artificial Sequence: Target Sequence/siNA antisense region (stab35)
  misc_feature (4)..(5): 2'-O-methyl
  misc_feature (6)..(7): 2'-deoxy-2'Fluoro
  misc_feature (8)..(11): 2'-O-methyl
  misc_feature (12)..(13): 2'-deoxy-2'Fluoro
  misc_feature (14)..(16): 2'-O-methyl
  misc_feature (17)..(18): 2'-deoxy-2'Fluoro
  misc_feature (19)..(21): 2'-O-methyl
cagggcugggguugggcuguu

SEQ ID NO: 2295 - RNA, 21 nt, Artificial Sequence
  Description of Artificial Sequence: Target Sequence/siNA antisense region (stab36)
  misc_feature (4)..(5): 2'-O-methyl
  misc_feature (6)..(7): 2'-deoxy-2'Fluoro
  misc_feature (8)..(11): 2'-O-methyl
  misc_feature (12)..(13): 2'-deoxy-2'Fluoro
  misc_feature (14)..(16): 2'-O-methyl
  misc_feature (17)..(18): 2'-deoxy-2'Fluoro
  misc_feature (19)..(21): 2'-O-methyl
cagggcugggguugggcuggg

SEQ ID NO: 2296 - RNA, 19 nt, Artificial Sequence
  Description of Artificial Sequence: Target Sequence/siNA sense region
gggucagcugauggggaca

SEQ ID NO: 2297 - RNA, 19 nt, Artificial Sequence
  Description of Artificial Sequence: Target Sequence/siNA antisense region
uguccccaucagcugaccc

SEQ ID NO: 2298 - DNA, 21 bp, Artificial Sequence
  Description of Artificial Sequence: Target Sequence/siNA sense region (stab00)
  misc_feature (1)..(19): ribonucleotide unmodified or modified as described for this sequence
gggucagcugauggggacatt

SEQ ID NO: 2299 - DNA, 21 bp, Artificial Sequence
  Description of Artificial Sequence: Target Sequence/siNA antisense region (stab00as)
  misc_feature (1)..(19): ribonucleotide unmodified or modified as described for this sequence
uguccccaucagcugaccctt

SEQ ID NO: 2300 - DNA, 21 bp, Artificial Sequence
  Description of Artificial Sequence: Target Sequence/siNA sense region (stab04)
  misc_feature (1)..(1): 5'-3 attached terminal deoxyabasic moiety, inverted abasic, inverted nucleotide or other terminal cap that is optionally present
  misc_feature (21)..(21): 3'-3 attached terminal deoxyabasic moiety, inverted abasic, inverted nucleotide or other terminal cap that is optionally present
  misc_feature (4)..(5): 2'-deoxy-2'Fluoro
  misc_feature (8)..(9): 2'-deoxy-2'Fluoro
  misc_feature (12)..(12): 2'-deoxy-2'Fluoro
  misc_feature (18)..(18): 2'-deoxy-2'Fluoro
  misc_feature (1)..(19): ribonucleotide unmodified or modified as described for this sequence
gggucagcugauggggacatt

SEQ ID NO: 2301 - DNA, 21 bp, Artificial Sequence
  Description of Artificial Sequence: Target Sequence/siNA antisense region (stab05)
  misc_feature (1)..(1): 2'-deoxy-2'Fluoro
  misc_feature (3)..(7): 2'-deoxy-2'Fluoro
  misc_feature (9)..(10): 2'-deoxy-2'Fluoro
  misc_feature (13)..(14): 2'-deoxy-2'Fluoro
  misc_feature (17)..(19): 2'-deoxy-2'Fluoro
  misc_feature (20)..(20): Phosphorothioate or Phosphorodithioate 3'-Internucleotide Linkage (optionally present)
  misc_feature (1)..(19): ribonucleotide unmodified or modified as described for this sequence
uguccccaucagcugaccctt

SEQ ID NO: 2302 - DNA, 21 bp, Artificial Sequence
  Description of Artificial Sequence: Target Sequence/siNA sense region (stab07)
  misc_feature (1)..(1): 5'-3 attached terminal deoxyabasic moiety, inverted abasic, inverted nucleotide or other terminal cap that is optionally present
  misc_feature (21)..(21): 3'-3 attached terminal deoxyabasic moiety, inverted abasic, inverted nucleotide or other terminal cap that is optionally present
  misc_feature (4)..(5): 2'-deoxy-2'Fluoro
  misc_feature (8)..(9): 2'-deoxy-2'Fluoro
  misc_feature (12)..(12): 2'-deoxy-2'Fluoro
  misc_feature (18)..(18): 2'-deoxy-2'Fluoro
  misc_feature (1)..(19): ribonucleotide unmodified or modified as described for this sequence
gggucagcugauggggacatt

SEQ ID NO: 2303 - DNA, 21 bp, Artificial Sequence
  Description of Artificial Sequence: Target Sequence/siNA antisense region (stab08)
  misc_feature (1)..(1): 2'-deoxy-2'Fluoro
  misc_feature (2)..(2): 2'-O-methyl
  misc_feature (3)..(7): 2'-deoxy-2'Fluoro
  misc_feature (8)..(8): 2'-O-methyl
  misc_feature (9)..(10): 2'-deoxy-2'Fluoro
  misc_feature (11)..(12): 2'-O-methyl
  misc_feature (13)..(14): 2'-deoxy-2'Fluoro
  misc_feature (15)..(16): 2'-O-methyl
  misc_feature (17)..(19): 2'-deoxy-2'Fluoro
  misc_feature (20)..(20): Phosphorothioate or Phosphorodithioate 3'-Internucleotide Linkage (optionally present)
  misc_feature (1)..(19): ribonucleotide unmodified or modified as described for this sequence
uguccccaucagcugaccctt

SEQ ID NO: 2304 - DNA, 21 bp, Artificial Sequence
  Description of Artificial Sequence: Target Sequence/siNA sense region (stab09)
  misc_feature (1)..(1): 5'-3 attached terminal deoxyabasic moiety, inverted abasic, inverted nucleotide or other terminal cap that is optionally present
  misc_feature (21)..(21): 3'-3 attached terminal deoxyabasic moiety, inverted abasic, inverted nucleotide or other terminal cap that is optionally present
  misc_feature (1)..(19): ribonucleotide unmodified or modified as described for this sequence
gggucagcugauggggacatt

SEQ ID NO: 2305 - DNA, 21 bp, Artificial Sequence
  Description of Artificial Sequence: Target Sequence/siNA antisense region (stab10)
  misc_feature (20)..(20): Phosphorothioate or Phosphorodithioate 3'-Internucleotide Linkage (optionally present)
  misc_feature (1)..(19): ribonucleotide unmodified or modified as described for this sequence
uguccccaucagcugaccctt

SEQ ID NO: 2306 - DNA, 21 bp, Artificial Sequence
  Description of Artificial Sequence: Target Sequence/siNA antisense region (stab19)
  misc_feature (21)..(21): 3'-3 attached terminal deoxyabasic moiety, inverted abasic, inverted nucleotide or other terminal cap that is optionally present
  misc_feature (1)..(1): 2'-deoxy-2'Fluoro
  misc_feature (2)..(2): 2'-O-methyl
  misc_feature (3)..(7): 2'-deoxy-2'Fluoro
  misc_feature (8)..(8): 2'-O-methyl
  misc_feature (9)..(10): 2'-deoxy-2'Fluoro
  misc_feature (11)..(12): 2'-O-methyl
  misc_feature (13)..(14): 2'-deoxy-2'Fluoro
  misc_feature (15)..(16): 2'-O-methyl
  misc_feature (17)..(19): 2'-deoxy-2'Fluoro
  misc_feature (1)..(19): ribonucleotide unmodified or modified as described for this sequence
uguccccaucagcugaccctt

SEQ ID NO: 2307 - DNA, 21 bp, Artificial Sequence
  Description of Artificial Sequence: Target Sequence/siNA antisense region (stab22)
  misc_feature (21)..(21): 3'-3 attached terminal deoxyabasic moiety, inverted abasic, inverted nucleotide or other terminal cap that is optionally present
  misc_feature (20)..(20): Phosphorothioate or Phosphorodithioate 3'-Internucleotide Linkage (optionally present)
  misc_feature (1)..(19): ribonucleotide unmodified or modified as described for this sequence
uguccccaucagcugaccctt

SEQ ID NO: 2308 - DNA, 21 bp, Artificial Sequence
  Description of Artificial Sequence: Target Sequence/siNA antisense region (stab25)
  misc_feature (4)..(7): 2'-deoxy-2'Fluoro
  misc_feature (8)..(8): 2'-O-methyl
  misc_feature (9)..(10): 2'-deoxy-2'Fluoro
  misc_feature (11)..(12): 2'-O-methyl
  misc_feature (13)..(14): 2'-deoxy-2'Fluoro
  misc_feature (15)..(16): 2'-O-methyl
  misc_feature (17)..(19): 2'-deoxy-2'Fluoro
  misc_feature (20)..(20): Phosphorothioate or Phosphorodithioate 3'-Internucleotide Linkage (optionally present)
  misc_feature (1)..(19): ribonucleotide unmodified or modified as described for this sequence
uguccccaucagcugaccctt

SEQ ID NO: 2309 - RNA, 21 nt, Artificial Sequence
  Description of Artificial Sequence: Target Sequence/siNA antisense region (stab35)
  misc_feature (4)..(7): 2'-deoxy-2'Fluoro
  misc_feature (8)..(8): 2'-O-methyl
  misc_feature (9)..(10): 2'-deoxy-2'Fluoro
  misc_feature (11)..(12): 2'-O-methyl
  misc_feature (13)..(14): 2'-deoxy-2'Fluoro
  misc_feature (15)..(16): 2'-O-methyl
  misc_feature (17)..(19): 2'-deoxy-2'Fluoro
  misc_feature (20)..(21): 2'-O-methyl
uguccccaucagcugacccuu

SEQ ID NO: 2310 - RNA, 21 nt, Artificial Sequence
  Description of Artificial Sequence: Target Sequence/siNA antisense region (stab36)
  misc_feature (4)..(7): 2'-deoxy-2'Fluoro
  misc_feature (8)..(8): 2'-O-methyl
  misc_feature (9)..(10): 2'-deoxy-2'Fluoro
  misc_feature (11)..(12): 2'-O-methyl
  misc_feature (13)..(14): 2'-deoxy-2'Fluoro
  misc_feature (15)..(16): 2'-O-methyl
  misc_feature (17)..(19): 2'-deoxy-2'Fluoro
  misc_feature (20)..(21): 2'-O-methyl
uguccccaucagcugacccag

SEQ ID NO: 2311 - RNA, 19 nt, Artificial Sequence
  Description of Artificial Sequence: Target Sequence/siNA sense region
aaggaauucucggaugccc

SEQ ID NO: 2312 - RNA, 19 nt, Artificial Sequence
  Description of Artificial Sequence: Target Sequence/siNA antisense region
gggcauccgagaauuccuu

SEQ ID NO: 2313 - DNA, 21 bp, Artificial Sequence
  Description of Artificial Sequence: Target Sequence/siNA sense region (stab00)
  misc_feature (1)..(19): ribonucleotide unmodified or modified as described for this sequence
aaggaauucucggaugccctt

SEQ ID NO: 2314 - DNA, 21 bp, Artificial Sequence
  Description of Artificial Sequence: Target Sequence/siNA antisense region (stab00as)
  misc_feature (1)..(19): ribonucleotide unmodified or modified as described for this sequence
gggcauccgagaauuccuutt

SEQ ID NO: 2315 - DNA, 21 bp, Artificial Sequence
  Description of Artificial Sequence: Target Sequence/siNA sense region (stab04)
  misc_feature (1)..(1): 5'-3 attached terminal deoxyabasic moiety, inverted abasic, inverted nucleotide or other terminal cap that is optionally present
  misc_feature (21)..(21): 3'-3 attached terminal deoxyabasic moiety, inverted abasic, inverted nucleotide or other terminal cap that is optionally present
  misc_feature (7)..(11): 2'-deoxy-2'Fluoro
  misc_feature (15)..(15): 2'-deoxy-2'Fluoro
  misc_feature (17)..(19): 2'-deoxy-2'Fluoro
  misc_feature (1)..(19): ribonucleotide unmodified or modified as described for this sequence
aaggaauucucggaugccctt

SEQ ID NO: 2316 - DNA, 21 bp, Artificial Sequence
  Description of Artificial Sequence: Target Sequence/siNA antisense region (stab05)
  misc_feature (4)..(4): 2'-deoxy-2'Fluoro
  misc_feature (6)..(8): 2'-deoxy-2'Fluoro
  misc_feature (14)..(19): 2'-deoxy-2'Fluoro
  misc_feature (20)..(20): Phosphorothioate or Phosphorodithioate 3'-Internucleotide Linkage (optionally present)
  misc_feature (1)..(19): ribonucleotide unmodified or modified as described for this sequence
gggcauccgagaauuccuutt

SEQ ID NO: 2317 - DNA, 21 bp, Artificial Sequence
  Description of Artificial Sequence: Target Sequence/siNA sense region (stab07)
  misc_feature (1)..(1): 5'-3 attached terminal deoxyabasic moiety, inverted abasic, inverted nucleotide or other terminal cap that is optionally present
  misc_feature (21)..(21): 3'-3 attached terminal deoxyabasic moiety, inverted abasic, inverted nucleotide or other terminal cap that is optionally present
  misc_feature (7)..(11): 2'-deoxy-2'Fluoro
  misc_feature (15)..(15): 2'-deoxy-2'Fluoro
  misc_feature (17)..(19): 2'-deoxy-2'Fluoro
  misc_feature (1)..(19): ribonucleotide unmodified or modified as described for this sequence
aaggaauucucggaugccctt

SEQ ID NO: 2318 - DNA, 21 bp, Artificial Sequence
  Description of Artificial Sequence: Target Sequence/siNA antisense region (stab08)
  misc_feature (1)..(3): 2'-O-methyl
  misc_feature (4)..(4): 2'-deoxy-2'Fluoro
  misc_feature (5)..(5): 2'-O-methyl
  misc_feature (6)..(8): 2'-deoxy-2'Fluoro
  misc_feature (9)..(13): 2'-O-methyl
  misc_feature (14)..(19): 2'-deoxy-2'Fluoro
  misc_feature (20)..(20): Phosphorothioate or Phosphorodithioate 3'-Internucleotide Linkage (optionally present)
  misc_feature (1)..(19): ribonucleotide unmodified or modified as described for this sequence
gggcauccgagaauuccuutt

SEQ ID NO: 2319 - DNA, 21 bp, Artificial Sequence
  Description of Artificial Sequence: Target Sequence/siNA sense region (stab09)
  misc_feature (1)..(1): 5'-3 attached terminal deoxyabasic moiety, inverted abasic, inverted nucleotide or other terminal cap that is optionally present
  misc_feature (21)..(21): 3'-3 attached terminal deoxyabasic moiety, inverted abasic, inverted nucleotide or other terminal cap that is optionally present
  misc_feature (1)..(19): ribonucleotide unmodified or modified as described for this sequence
aaggaauucucggaugccctt

SEQ ID NO: 2320 - DNA, 21 bp, Artificial Sequence
  Description of Artificial Sequence: Target Sequence/siNA antisense region (stab10)
  misc_feature (20)..(20): Phosphorothioate or Phosphorodithioate 3'-Internucleotide Linkage (optionally present)
  misc_feature (1)..(19): ribonucleotide unmodified or modified as described for this sequence
gggcauccgagaauuccuutt

SEQ ID NO: 2321 - DNA, 21 bp, Artificial Sequence
  Description of Artificial Sequence: Target Sequence/siNA antisense region (stab19)
  misc_feature (21)..(21): 3'-3 attached terminal deoxyabasic moiety, inverted abasic, inverted nucleotide or other terminal cap that is optionally present
  misc_feature (1)..(3): 2'-O-methyl
  misc_feature (4)..(4): 2'-deoxy-2'Fluoro
  misc_feature (5)..(5): 2'-O-methyl
  misc_feature (6)..(8): 2'-deoxy-2'Fluoro
  misc_feature (9)..(13): 2'-O-methyl
  misc_feature (14)..(19): 2'-deoxy-2'Fluoro
  misc_feature (1)..(19): ribonucleotide unmodified or modified as described for this sequence
gggcauccgagaauuccuutt

SEQ ID NO: 2322 - DNA, 21 bp, Artificial Sequence
  Description of Artificial Sequence: Target Sequence/siNA antisense region (stab22)
  misc_feature (21)..(21): 3'-3 attached terminal deoxyabasic moiety, inverted abasic, inverted nucleotide or other terminal cap that is optionally present
  misc_feature (20)..(20): Phosphorothioate or Phosphorodithioate 3'-Internucleotide Linkage (optionally present)
  misc_feature (1)..(19): ribonucleotide unmodified or modified as described for this sequence
gggcauccgagaauuccuutt

SEQ ID NO: 2323 - DNA, 21 bp, Artificial Sequence
  Description of Artificial Sequence: Target Sequence/siNA antisense region (stab25)
  misc_feature (4)..(4): 2'-deoxy-2'Fluoro
  misc_feature (5)..(5): 2'-O-methyl
  misc_feature (6)..(8): 2'-deoxy-2'Fluoro
  misc_feature (9)..(13): 2'-O-methyl
  misc_feature (14)..(19): 2'-deoxy-2'Fluoro
  misc_feature (20)..(20): Phosphorothioate or Phosphorodithioate 3'-Internucleotide Linkage (optionally present)
  misc_feature (1)..(19): ribonucleotide unmodified or modified as described for this sequence
gggcauccgagaauuccuutt

SEQ ID NO: 2324 - RNA, 21 nt, Artificial Sequence
  Description of Artificial Sequence: Target Sequence/siNA antisense region (stab35)
  misc_feature (4)..(4): 2'-deoxy-2'Fluoro
  misc_feature (5)..(5): 2'-O-methyl
  misc_feature (6)..(8): 2'-deoxy-2'Fluoro
  misc_feature (9)..(13): 2'-O-methyl
  misc_feature (14)..(19): 2'-deoxy-2'Fluoro
  misc_feature (20)..(21): 2'-O-methyl
gggcauccgagaauuccuuuu

SEQ ID NO: 2325 - RNA, 21 nt, Artificial Sequence
  Description of Artificial Sequence: Target Sequence/siNA antisense region (stab36)
  misc_feature (4)..(4): 2'-deoxy-2'Fluoro
  misc_feature (5)..(5): 2'-O-methyl
  misc_feature (6)..(8): 2'-deoxy-2'Fluoro
  misc_feature (9)..(13): 2'-O-methyl
  misc_feature (14)..(19): 2'-deoxy-2'Fluoro
  misc_feature (20)..(21): 2'-O-methyl
gggcauccgagaauuccuugu

SEQ ID NO: 2326 - RNA, 19 nt, Artificial Sequence
  Description of Artificial Sequence: Target Sequence/siNA sense region
cucggguaccugcagcugc

SEQ ID NO: 2327 - RNA, 19 nt, Artificial Sequence
  Description of Artificial Sequence: Target Sequence/siNA antisense region
gcagcugcagguacccgag

SEQ ID NO: 2328 - DNA, 21 bp, Artificial Sequence
  Description of Artificial Sequence: Target Sequence/siNA sense region (stab00)
  misc_feature (1)..(19): ribonucleotide unmodified or modified as described for this sequence
cucggguaccugcagcugctt

SEQ ID NO: 2329 - DNA, 21 bp, Artificial Sequence
  Description of Artificial Sequence: Target Sequence/siNA antisense region (stab00as)
  misc_feature (1)..(19): ribonucleotide unmodified or modified as described for this sequence
gcagcugcagguacccgagtt

SEQ ID NO: 2330 - DNA, 21 bp, Artificial Sequence
  Description of Artificial Sequence: Target Sequence/siNA sense region (stab04)
  misc_feature (1)..(1): 5'-3 attached terminal deoxyabasic moiety, inverted abasic, inverted nucleotide or other terminal cap that is optionally present
  misc_feature (21)..(21): 3'-3 attached terminal deoxyabasic moiety, inverted abasic, inverted nucleotide or other terminal cap that is optionally present
  misc_feature (1)..(3): 2'-deoxy-2'Fluoro
  misc_feature (7)..(7): 2'-deoxy-2'Fluoro
  misc_feature (9)..(11): 2'-deoxy-2'Fluoro
  misc_feature (13)..(13): 2'-deoxy-2'Fluoro
  misc_feature (16)..(17): 2'-deoxy-2'Fluoro
  misc_feature (19)..(19): 2'-deoxy-2'Fluoro
  misc_feature (1)..(19): ribonucleotide unmodified or modified as described for this sequence
cucggguaccugcagcugctt

SEQ ID NO: 2331 - DNA, 21 bp, Artificial Sequence
  Description of Artificial Sequence: Target Sequence/siNA antisense region (stab05)
  misc_feature (2)..(2): 2'-deoxy-2'Fluoro
  misc_feature (5)..(6): 2'-deoxy-2'Fluoro
  misc_feature (8)..(8): 2'-deoxy-2'Fluoro
  misc_feature (12)..(12): 2'-deoxy-2'Fluoro
  misc_feature (14)..(16): 2'-deoxy-2'Fluoro
  misc_feature (20)..(20): Phosphorothioate or Phosphorodithioate 3'-Internucleotide Linkage (optionally present)
  misc_feature (1)..(19): ribonucleotide unmodified or modified as described for this sequence
gcagcugcagguacccgagtt

SEQ ID NO: 2332 - DNA, 21 bp, Artificial Sequence
  Description of Artificial Sequence: Target Sequence/siNA sense region (stab07)
  misc_feature (1)..(1): 5'-3 attached terminal deoxyabasic moiety, inverted abasic, inverted nucleotide or other terminal cap that is optionally present
  misc_feature (21)..(21): 3'-3 attached terminal deoxyabasic moiety, inverted abasic, inverted nucleotide or other terminal cap that is optionally present
  misc_feature (1)..(3): 2'-deoxy-2'Fluoro
  misc_feature (7)..(7): 2'-deoxy-2'Fluoro
  misc_feature (9)..(11): 2'-deoxy-2'Fluoro
  misc_feature (13)..(13): 2'-deoxy-2'Fluoro
  misc_feature (16)..(17): 2'-deoxy-2'Fluoro
  misc_feature (19)..(19): 2'-deoxy-2'Fluoro
  misc_feature (1)..(19): ribonucleotide unmodified or modified as described for this sequence
cucggguaccugcagcugctt

SEQ ID NO: 2333 - DNA, 21 bp, Artificial Sequence
  Description of Artificial Sequence: Target Sequence/siNA antisense region (stab08)
  misc_feature (1)..(1): 2'-O-methyl
  misc_feature (2)..(2): 2'-deoxy-2'Fluoro
  misc_feature (3)..(4): 2'-O-methyl
  misc_feature (5)..(6): 2'-deoxy-2'Fluoro
  misc_feature (7)..(7): 2'-O-methyl
  misc_feature (8)..(8): 2'-deoxy-2'Fluoro
  misc_feature (9)..(11): 2'-O-methyl
  misc_feature (12)..(12): 2'-deoxy-2'Fluoro
  misc_feature (13)..(13): 2'-O-methyl
  misc_feature (14)..(16): 2'-deoxy-2'Fluoro
  misc_feature (17)..(19): 2'-O-methyl
  misc_feature (20)..(20): Phosphorothioate or Phosphorodithioate 3'-Internucleotide Linkage (optionally present)
  misc_feature (1)..(19): ribonucleotide unmodified or modified as described for this sequence
gcagcugcagguacccgagtt

SEQ ID NO: 2334 - DNA, 21 bp, Artificial Sequence
  Description of Artificial Sequence: Target Sequence/siNA sense region (stab09)
  misc_feature (1)..(1): 5'-3 attached terminal deoxyabasic moiety, inverted abasic, inverted nucleotide or other terminal cap that is optionally present
  misc_feature (21)..(21): 3'-3 attached terminal deoxyabasic moiety, inverted abasic, inverted nucleotide or other terminal cap that is optionally present
  misc_feature (1)..(19): ribonucleotide unmodified or modified as described for this sequence
cucggguaccugcagcugctt

SEQ ID NO: 2335 - DNA, 21 bp, Artificial Sequence
  Description of Artificial Sequence: Target Sequence/siNA antisense region (stab10)
  misc_feature (20)..(20): Phosphorothioate or Phosphorodithioate 3'-Internucleotide Linkage (optionally present)
  misc_feature (1)..(19): ribonucleotide unmodified or modified as described for this sequence
gcagcugcagguacccgagtt

SEQ ID NO: 2336 - DNA, 21 bp, Artificial Sequence
  Description of Artificial Sequence: Target Sequence/siNA antisense region (stab19)
  misc_feature (21)..(21): 3'-3 attached terminal deoxyabasic moiety, inverted abasic, inverted nucleotide or other terminal cap that is optionally present
  misc_feature (1)..(1): 2'-O-methyl
  misc_feature (2)..(2): 2'-deoxy-2'Fluoro
  misc_feature (3)..(4): 2'-O-methyl
  misc_feature (5)..(6): 2'-deoxy-2'Fluoro
  misc_feature (7)..(7): 2'-O-methyl
  misc_feature (8)..(8): 2'-deoxy-2'Fluoro
  misc_feature (9)..(11): 2'-O-methyl
  misc_feature (12)..(12): 2'-deoxy-2'Fluoro
  misc_feature (13)..(13): 2'-O-methyl
  misc_feature (14)..(16): 2'-deoxy-2'Fluoro
  misc_feature (17)..(19): 2'-O-methyl
  misc_feature (1)..(19): ribonucleotide unmodified or modified as described for this sequence
gcagcugcagguacccgagtt

SEQ ID NO: 2337 - DNA, 21 bp, Artificial Sequence
  Description of Artificial Sequence: Target Sequence/siNA antisense region (stab22)
  misc_feature (21)..(21): 3'-3 attached terminal deoxyabasic moiety, inverted abasic, inverted nucleotide or other terminal cap that is optionally present
  misc_feature (20)..(20): Phosphorothioate or Phosphorodithioate 3'-Internucleotide Linkage (optionally present)
  misc_feature (1)..(19): ribonucleotide unmodified or modified as described for this sequence
gcagcugcagguacccgagtt

SEQ ID NO: 2338 - DNA, 21 bp, Artificial Sequence
  Description of Artificial Sequence: Target Sequence/siNA antisense region (stab25)
  misc_feature (4)..(4): 2'-O-methyl
  misc_feature (5)..(6): 2'-deoxy-2'Fluoro
  misc_feature (7)..(7): 2'-O-methyl
  misc_feature (8)..(8): 2'-deoxy-2'Fluoro
  misc_feature (9)..(11): 2'-O-methyl
  misc_feature (12)..(12): 2'-deoxy-2'Fluoro
  misc_feature (13)..(13): 2'-O-methyl
  misc_feature (14)..(16): 2'-deoxy-2'Fluoro
  misc_feature (17)..(19): 2'-O-methyl
  misc_feature (20)..(20): Phosphorothioate or Phosphorodithioate 3'-Internucleotide Linkage (optionally present)
  misc_feature (1)..(19): ribonucleotide unmodified or modified as described for this sequence
gcagcugcagguacccgagtt

SEQ ID NO: 2339 - RNA, 21 nt, Artificial Sequence
  Description of Artificial Sequence: Target Sequence/siNA antisense region (stab35)
  misc_feature (4)..(4): 2'-O-methyl
  misc_feature (5)..(6): 2'-deoxy-2'Fluoro
  misc_feature (7)..(7): 2'-O-methyl
  misc_feature (8)..(8): 2'-deoxy-2'Fluoro
  misc_feature (9)..(11): 2'-O-methyl
  misc_feature (12)..(12): 2'-deoxy-2'Fluoro
  misc_feature (13)..(13): 2'-O-methyl
  misc_feature (14)..(16): 2'-deoxy-2'Fluoro
  misc_feature (17)..(21): 2'-O-methyl
gcagcugcagguacccgaguu

SEQ ID NO: 2340 - RNA, 21 nt, Artificial Sequence
  Description of Artificial Sequence: Target Sequence/siNA antisense region (stab36)
  misc_feature (4)..(4): 2'-O-methyl
  misc_feature (5)..(6): 2'-deoxy-2'Fluoro
  misc_feature (7)..(7): 2'-O-methyl
  misc_feature (8)..(8): 2'-deoxy-2'Fluoro
  misc_feature (9)..(11): 2'-O-methyl
  misc_feature (12)..(12): 2'-deoxy-2'Fluoro
  misc_feature (13)..(13): 2'-O-methyl
  misc_feature (14)..(16): 2'-deoxy-2'Fluoro
  misc_feature (17)..(21): 2'-O-methyl
gcagcugcagguacccgaggg

SEQ ID NO: 2341 - RNA, 19 nt, Artificial Sequence
  Description of Artificial Sequence: Target Sequence/siNA sense region
cugaacagcuguucugaug

SEQ ID NO: 2342 - RNA, 19 nt, Artificial Sequence
  Description of Artificial Sequence: Target Sequence/siNA antisense region
caucagaacagcuguucag

SEQ ID NO: 2343 - DNA, 21 bp, Artificial Sequence
  Description of Artificial Sequence: Target Sequence/siNA sense region (stab00)
  misc_feature (1)..(19): ribonucleotide unmodified or modified as described for this sequence
cugaacagcuguucugaugtt

SEQ ID NO: 2344 - DNA, 21 bp, Artificial Sequence
  Description of Artificial Sequence: Target Sequence/siNA antisense region (stab00as)
  misc_feature (1)..(19): ribonucleotide unmodified or modified as described for this sequence
caucagaacagcuguucagtt

SEQ ID NO: 2345 - DNA, 21 bp, Artificial Sequence
  Description of Artificial Sequence: Target Sequence/siNA sense region (stab04)
  misc_feature (1)..(1): 5'-3 attached terminal deoxyabasic moiety, inverted abasic, inverted nucleotide or other terminal cap that is optionally present
  misc_feature (21)..(21): 3'-3 attached terminal deoxyabasic moiety, inverted abasic, inverted nucleotide or other terminal cap that is optionally present
  misc_feature (1)..(2): 2'-deoxy-2'Fluoro
  misc_feature (6)..(6): 2'-deoxy-2'Fluoro
  misc_feature (9)..(10): 2'-deoxy-2'Fluoro
  misc_feature (12)..(15): 2'-deoxy-2'Fluoro
  misc_feature (18)..(18): 2'-deoxy-2'Fluoro
  misc_feature (1)..(19): ribonucleotide unmodified or modified as described for this sequence
cugaacagcuguucugaugtt

SEQ ID NO: 2346 - DNA, 21 bp, Artificial Sequence
  Description of Artificial Sequence: Target Sequence/siNA antisense region (stab05)
  misc_feature (1)..(1): 2'-deoxy-2'Fluoro
  misc_feature (3)..(4): 2'-deoxy-2'Fluoro
  misc_feature (9)..(9): 2'-deoxy-2'Fluoro
  misc_feature (12)..(13): 2'-deoxy-2'Fluoro
  misc_feature (15)..(17): 2'-deoxy-2'Fluoro
  misc_feature (20)..(20): Phosphorothioate or Phosphorodithioate 3'-Internucleotide Linkage (optionally present)
  misc_feature (1)..(19): ribonucleotide unmodified or modified as described for this sequence
caucagaacagcuguucagtt

SEQ ID NO: 2347 - DNA, 21 bp, Artificial Sequence
  Description of Artificial Sequence: Target Sequence/siNA sense region (stab07)
  misc_feature (1)..(1): 5'-3 attached terminal deoxyabasic moiety, inverted abasic, inverted nucleotide or other terminal cap that is optionally present
  misc_feature (21)..(21): 3'-3 attached terminal deoxyabasic moiety, inverted abasic, inverted nucleotide or other terminal cap that is optionally present
  misc_feature (1)..(2): 2'-deoxy-2'Fluoro
  misc_feature (6)..(6): 2'-deoxy-2'Fluoro
  misc_feature (9)..(10): 2'-deoxy-2'Fluoro
  misc_feature (12)..(15): 2'-deoxy-2'Fluoro
  misc_feature (18)..(18): 2'-deoxy-2'Fluoro
  misc_feature (1)..(19): ribonucleotide unmodified or modified as described for this sequence
cugaacagcuguucugaugtt

SEQ ID NO: 2348 - DNA, 21 bp, Artificial Sequence
  Description of Artificial Sequence: Target Sequence/siNA antisense region (stab08)
  misc_feature (1)..(1): 2'-deoxy-2'Fluoro
  misc_feature (2)..(2): 2'-O-methyl
  misc_feature (3)..(4): 2'-deoxy-2'Fluoro
  misc_feature (5)..(8): 2'-O-methyl
  misc_feature (9)..(9): 2'-deoxy-2'Fluoro
  misc_feature (10)..(11): 2'-O-methyl
  misc_feature (12)..(13): 2'-deoxy-2'Fluoro
  misc_feature (14)..(14): 2'-O-methyl
  misc_feature (15)..(17): 2'-deoxy-2'Fluoro
  misc_feature (18)..(19): 2'-O-methyl
  misc_feature (20)..(20): Phosphorothioate or Phosphorodithioate 3'-Internucleotide Linkage (optionally present)
  misc_feature (1)..(19): ribonucleotide unmodified or modified as described for this sequence
caucagaacagcuguucagtt

SEQ ID NO: 2349 - DNA, 21 bp, Artificial Sequence
  Description of Artificial Sequence: Target Sequence/siNA sense region (stab09)
  misc_feature (1)..(1): 5'-3 attached terminal deoxyabasic moiety, inverted abasic, inverted nucleotide or other terminal cap that is optionally present
  misc_feature (21)..(21): 3'-3 attached terminal deoxyabasic moiety, inverted abasic, inverted nucleotide or other terminal cap that is optionally present
  misc_feature (1)..(19): ribonucleotide unmodified or modified as described for this sequence
cugaacagcuguucugaugtt

SEQ ID NO: 2350 - DNA, 21 bp, Artificial Sequence
  Description of Artificial Sequence: Target Sequence/siNA antisense region (stab10)
  misc_feature (20)..(20): Phosphorothioate or Phosphorodithioate 3'-Internucleotide Linkage (optionally present)
  misc_feature (1)..(19): ribonucleotide unmodified or modified as described for this sequence
caucagaacagcuguucagtt

SEQ ID NO: 2351 - DNA, 21 bp, Artificial Sequence
  Description of Artificial Sequence: Target Sequence/siNA antisense region (stab19)
  misc_feature (21)..(21): 3'-3 attached terminal deoxyabasic moiety, inverted abasic, inverted nucleotide or other terminal cap that is optionally present
  misc_feature (1)..(1): 2'-deoxy-2'Fluoro
  misc_feature (2)..(2): 2'-O-methyl
  misc_feature (3)..(4): 2'-deoxy-2'Fluoro
  misc_feature (5)..(8): 2'-O-methyl
  misc_feature (9)..(9): 2'-deoxy-2'Fluoro
  misc_feature (10)..(11): 2'-O-methyl
  misc_feature (12)..(13): 2'-deoxy-2'Fluoro
  misc_feature (14)..(14): 2'-O-methyl
  misc_feature (15)..(17): 2'-deoxy-2'Fluoro
  misc_feature (18)..(19): 2'-O-methyl
  misc_feature (1)..(19): ribonucleotide unmodified or modified as described for this sequence
caucagaacagcuguucagtt

SEQ ID NO: 2352 - DNA, 21 bp, Artificial Sequence
  Description of Artificial Sequence: Target Sequence/siNA antisense region (stab22)
  misc_feature (21)..(21): 3'-3 attached terminal deoxyabasic moiety, inverted abasic, inverted nucleotide or other terminal cap that is optionally present
  misc_feature (20)..(20): Phosphorothioate or Phosphorodithioate 3'-Internucleotide Linkage (optionally present)
  misc_feature (1)..(19): ribonucleotide unmodified or modified as described for this sequence
caucagaacagcuguucagtt

SEQ ID NO: 2353 - DNA, 21 bp, Artificial Sequence
  Description of Artificial Sequence: Target Sequence/siNA antisense region (stab25)
  misc_feature (4)..(4): 2'-deoxy-2'Fluoro
  misc_feature (5)..(8): 2'-O-methyl
  misc_feature (9)..(9): 2'-deoxy-2'Fluoro
  misc_feature (10)..(11): 2'-O-methyl
  misc_feature (12)..(13): 2'-deoxy-2'Fluoro
  misc_feature (14)..(14): 2'-O-methyl
  misc_feature (15)..(17): 2'-deoxy-2'Fluoro
  misc_feature (18)..(19): 2'-O-methyl
  misc_feature (20)..(20): Phosphorothioate or Phosphorodithioate 3'-Internucleotide Linkage (optionally present)
  misc_feature (1)..(19): ribonucleotide unmodified or modified as described for this sequence
caucagaacagcuguucagtt

SEQ ID NO: 2354 - RNA, 21 nt, Artificial Sequence
  Description of Artificial Sequence: Target Sequence/siNA antisense region (stab35)
  misc_feature (4)..(4): 2'-deoxy-2'Fluoro
  misc_feature (5)..(8): 2'-O-methyl
  misc_feature (9)..(9): 2'-deoxy-2'Fluoro
  misc_feature (10)..(11): 2'-O-methyl
  misc_feature (12)..(13): 2'-deoxy-2'Fluoro
  misc_feature (14)..(14): 2'-O-methyl
  misc_feature (15)..(17): 2'-deoxy-2'Fluoro
  misc_feature (18)..(21): 2'-O-methyl
caucagaacagcuguucaguu

SEQ ID NO: 2355 - RNA, 21 nt, Artificial Sequence
  Description of Artificial Sequence: Target Sequence/siNA antisense region (stab36)
  misc_feature (4)..(4): 2'-deoxy-2'Fluoro
  misc_feature (5)..(8): 2'-O-methyl
  misc_feature (9)..(9): 2'-deoxy-2'Fluoro
  misc_feature (10)..(11): 2'-O-methyl
  misc_feature (12)..(13): 2'-deoxy-2'Fluoro
  misc_feature (14)..(14): 2'-O-methyl
  misc_feature (15)..(17): 2'-deoxy-2'Fluoro
  misc_feature (18)..(21): 2'-O-methyl
caucagaacagcuguucagca

SEQ ID NO: 2356 - RNA, 19 nt, Artificial Sequence
  Description of Artificial Sequence: Target Sequence/siNA sense region
gcugcgggggcuccugccu

SEQ ID NO: 2357 - RNA, 19 nt, Artificial Sequence
  Description of Artificial Sequence: Target Sequence/siNA antisense region
aggcaggagcccccgcagc

SEQ ID NO: 2358 - DNA, 21 bp, Artificial Sequence
  Description of Artificial Sequence: Target Sequence/siNA sense region (stab00)
  misc_feature (1)..(19): ribonucleotide unmodified or modified as described for this sequence
gcugcgggggcuccugccutt

SEQ ID NO: 2359 - DNA, 21 bp, Artificial Sequence
  Description of Artificial Sequence: Target Sequence/siNA antisense region (stab00as)
  misc_feature (1)..(19): ribonucleotide unmodified or modified as described for this sequence
aggcaggagcccccgcagctt

SEQ ID NO: 2360 - DNA, 21 bp, Artificial Sequence
  Description of Artificial Sequence: Target Sequence/siNA sense region (stab04)
  misc_feature (1)..(1): 5'-3 attached terminal deoxyabasic moiety, inverted abasic, inverted nucleotide or other terminal cap that is optionally present
  misc_feature (21)..(21): 3'-3 attached terminal deoxyabasic moiety, inverted abasic, inverted nucleotide or other terminal cap that is optionally present
  misc_feature (2)..(3): 2'-deoxy-2'Fluoro
  misc_feature (5)..(5): 2'-deoxy-2'Fluoro
  misc_feature (11)..(15): 2'-deoxy-2'Fluoro
  misc_feature (17)..(19): 2'-deoxy-2'Fluoro
  misc_feature (1)..(19): ribonucleotide unmodified or modified as described for this sequence
gcugcgggggcuccugccutt

SEQ ID NO: 2361 - DNA, 21 bp, Artificial Sequence
  Description of Artificial Sequence: Target Sequence/siNA antisense region (stab05)
  misc_feature (4)..(4): 2'-deoxy-2'Fluoro
  misc_feature (10)..(14): 2'-deoxy-2'Fluoro
  misc_feature (16)..(16): 2'-deoxy-2'Fluoro
  misc_feature (19)..(19): 2'-deoxy-2'Fluoro
  misc_feature (20)..(20): Phosphorothioate or Phosphorodithioate 3'-Internucleotide Linkage (optionally present)
  misc_feature (1)..(19): ribonucleotide unmodified or modified as described for this sequence
aggcaggagcccccgcagctt

SEQ ID NO: 2362 - DNA, 21 bp, Artificial Sequence
  Description of Artificial Sequence: Target Sequence/siNA sense region (stab07)
  misc_feature (1)..(1): 5'-3 attached terminal deoxyabasic moiety, inverted abasic, inverted nucleotide or other terminal cap that is optionally present
  misc_feature (21)..(21): 3'-3 attached terminal deoxyabasic moiety, inverted abasic, inverted nucleotide or other terminal cap that is optionally present
  misc_feature (2)..(3): 2'-deoxy-2'Fluoro
  misc_feature (5)..(5): 2'-deoxy-2'Fluoro
  misc_feature (11)..(15): 2'-deoxy-2'Fluoro
  misc_feature (17)..(19): 2'-deoxy-2'Fluoro
  misc_feature (1)..(19): ribonucleotide unmodified or modified as described for this sequence
gcugcgggggcuccugccutt

SEQ ID NO: 2363 - DNA, 21 bp, Artificial Sequence
  Description of Artificial Sequence: Target Sequence/siNA antisense region (stab08)
  misc_feature (1)..(3): 2'-O-methyl
  misc_feature (4)..(4): 2'-deoxy-2'Fluoro
  misc_feature (5)..(9): 2'-O-methyl
  misc_feature (10)..(14): 2'-deoxy-2'Fluoro
  misc_feature (15)..(15): 2'-O-methyl
  misc_feature (16)..(16): 2'-deoxy-2'Fluoro
  misc_feature (17)..(18): 2'-O-methyl
  misc_feature (19)..(19): 2'-deoxy-2'Fluoro
  misc_feature (20)..(20): Phosphorothioate or Phosphorodithioate 3'-Internucleotide Linkage (optionally present)
  misc_feature (1)..(19): ribonucleotide unmodified or modified as described for this sequence
aggcaggagcccccgcagctt

SEQ ID NO: 2364 - DNA, 21 bp, Artificial Sequence
  Description of Artificial Sequence: Target Sequence/siNA sense region (stab09)
  misc_feature (1)..(1): 5'-3 attached terminal deoxyabasic moiety, inverted abasic, inverted nucleotide or other terminal cap that is optionally present
  misc_feature (21)..(21): 3'-3 attached terminal deoxyabasic moiety, inverted abasic, inverted nucleotide or other terminal cap that is optionally present
  misc_feature (1)..(19): ribonucleotide unmodified or modified as described for this sequence
gcugcgggggcuccugccutt

SEQ ID NO: 2365 - DNA, 21 bp, Artificial Sequence
  Description of Artificial Sequence: Target Sequence/siNA antisense region (stab10)
  misc_feature (20)..(20): Phosphorothioate or Phosphorodithioate 3'-Internucleotide Linkage (optionally present)
  misc_feature (1)..(19): ribonucleotide unmodified or modified as described for this sequence
aggcaggagcccccgcagctt

SEQ ID NO: 2366 - DNA, 21 bp, Artificial Sequence
  Description of Artificial Sequence: Target Sequence/siNA antisense region (stab19)
  misc_feature (21)..(21): 3'-3 attached terminal deoxyabasic moiety, inverted abasic, inverted nucleotide or other terminal cap that is optionally present
  misc_feature (1)..(3): 2'-O-methyl
  misc_feature (4)..(4): 2'-deoxy-2'Fluoro
  misc_feature (5)..(9): 2'-O-methyl
  misc_feature (10)..(14): 2'-deoxy-2'Fluoro
  misc_feature (15)..(15): 2'-O-methyl
  misc_feature (16)..(16): 2'-deoxy-2'Fluoro
  misc_feature (17)..(18): 2'-O-methyl
  misc_feature (19)..(19): 2'-deoxy-2'Fluoro
  misc_feature (1)..(19): ribonucleotide unmodified or modified as described for this sequence
aggcaggagcccccgcagctt

SEQ ID NO: 2367 - DNA, 21 bp, Artificial Sequence
  Description of Artificial Sequence: Target Sequence/siNA antisense region (stab22)
  misc_feature (21)..(21): 3'-3 attached terminal deoxyabasic moiety, inverted abasic, inverted nucleotide or other terminal cap that is optionally present
  misc_feature (20)..(20): Phosphorothioate or Phosphorodithioate 3'-Internucleotide Linkage (optionally present)
  misc_feature (1)..(19): ribonucleotide unmodified or modified as described for this sequence
aggcaggagcccccgcagctt

SEQ ID NO: 2368 - DNA, 21 bp, Artificial Sequence
  Description of Artificial Sequence: Target Sequence/siNA antisense region (stab25)
  misc_feature (4)..(4): 2'-deoxy-2'Fluoro
  misc_feature (5)..(9): 2'-O-methyl
  misc_feature (10)..(14): 2'-deoxy-2'Fluoro
  misc_feature (15)..(15): 2'-O-methyl
  misc_feature (16)..(16): 2'-deoxy-2'Fluoro
  misc_feature (17)..(18): 2'-O-methyl
  misc_feature (19)..(19): 2'-deoxy-2'Fluoro
  misc_feature (20)..(20): Phosphorothioate or Phosphorodithioate 3'-Internucleotide Linkage (optionally present)
  misc_feature (1)..(19): ribonucleotide unmodified or modified as described for this sequence
aggcaggagcccccgcagctt

SEQ ID NO: 2369 - RNA, 21 nt, Artificial Sequence
  Description of Artificial Sequence: Target Sequence/siNA antisense region (stab35)
  misc_feature (4)..(4): 2'-deoxy-2'Fluoro
  misc_feature (5)..(9): 2'-O-methyl
  misc_feature (10)..(14): 2'-deoxy-2'Fluoro
  misc_feature (15)..(15): 2'-O-methyl
  misc_feature (16)..(16): 2'-deoxy-2'Fluoro
  misc_feature (17)..(18): 2'-O-methyl
  misc_feature (19)..(19): 2'-deoxy-2'Fluoro
  misc_feature (20)..(21): 2'-O-methyl
aggcaggagcccccgcagcuu

SEQ ID NO: 2370 - RNA, 21 nt, Artificial Sequence
  Description of Artificial Sequence: Target Sequence/siNA antisense region (stab36)
  misc_feature (4)..(4): 2'-deoxy-2'Fluoro
  misc_feature (5)..(9): 2'-O-methyl
  misc_feature (10)..(14): 2'-deoxy-2'Fluoro
  misc_feature (15)..(15): 2'-O-methyl
  misc_feature (16)..(16): 2'-deoxy-2'Fluoro
  misc_feature (17)..(18): 2'-O-methyl
  misc_feature (19)..(19): 2'-deoxy-2'Fluoro
  misc_feature (20)..(21): 2'-O-methyl
aggcaggagcccccgcagcau

SEQ ID NO: 2371 - RNA, 19 nt, Artificial Sequence
  Description of Artificial Sequence: Target Sequence/siNA sense region
uacagcuucuccaucaguu

SEQ ID NO: 2372 - RNA, 19 nt, Artificial Sequence
  Description of Artificial Sequence: Target Sequence/siNA antisense region
aacugauggagaagcugua

SEQ ID NO: 2373 - DNA, 21 bp, Artificial Sequence
  Description of Artificial Sequence: Target Sequence/siNA sense region (stab00)
  misc_feature (1)..(19): ribonucleotide unmodified or modified as described for this sequence
uacagcuucuccaucaguutt

SEQ ID NO: 2374 - DNA, 21 bp, Artificial Sequence
  Description of Artificial Sequence: Target Sequence/siNA antisense region (stab00as)
  misc_feature (1)..(19): ribonucleotide unmodified or modified as described for this sequence
aacugauggagaagcuguatt

SEQ ID NO: 2375 - DNA, 21 bp, Artificial Sequence
  Description of Artificial Sequence: Target Sequence/siNA sense region (stab04)
  misc_feature (1)..(1): 5'-3 attached terminal deoxyabasic moiety, inverted abasic, inverted nucleotide or other terminal cap that is optionally present
  misc_feature (21)..(21): 3'-3 attached terminal deoxyabasic moiety, inverted abasic, inverted nucleotide or other terminal cap that is optionally present
  misc_feature (1)..(1): 2'-deoxy-2'Fluoro
  misc_feature (3)..(3): 2'-deoxy-2'Fluoro
  misc_feature (6)..(12): 2'-deoxy-2'Fluoro
  misc_feature (14)..(15): 2'-deoxy-2'Fluoro
  misc_feature (18)..(19): 2'-deoxy-2'Fluoro
  misc_feature (1)..(19): ribonucleotide unmodified or modified as described for this sequence
uacagcuucuccaucaguutt

SEQ ID NO: 2376 - DNA, 21 bp, Artificial Sequence
  Description of Artificial Sequence: Target Sequence/siNA antisense region (stab05)
  misc_feature (3)..(4): 2'-deoxy-2'Fluoro
  misc_feature (7)..(7): 2'-deoxy-2'Fluoro
  misc_feature (15)..(16): 2'-deoxy-2'Fluoro
  misc_feature (18)..(18): 2'-deoxy-2'Fluoro
  misc_feature (20)..(20): Phosphorothioate or Phosphorodithioate 3'-Internucleotide Linkage (optionally present)
  misc_feature (1)..(19): ribonucleotide unmodified or modified as described for this sequence
aacugauggagaagcuguatt

SEQ ID NO: 2377 - DNA, 21 bp, Artificial Sequence
  Description of Artificial Sequence: Target Sequence/siNA sense region (stab07)
  misc_feature (1)..(1): 5'-3 attached terminal deoxyabasic moiety, inverted abasic, inverted nucleotide or other terminal cap that is optionally present
  misc_feature (21)..(21): 3'-3 attached terminal deoxyabasic moiety, inverted abasic, inverted nucleotide or other terminal cap that is optionally present
  misc_feature (1)..(1): 2'-deoxy-2'Fluoro
  misc_feature (3)..(3): 2'-deoxy-2'Fluoro
  misc_feature (6)..(12): 2'-deoxy-2'Fluoro
  misc_feature (14)..(15): 2'-deoxy-2'Fluoro
  misc_feature (18)..(19): 2'-deoxy-2'Fluoro
  misc_feature (1)..(19): ribonucleotide unmodified or modified as described for this sequence
uacagcuucuccaucaguutt

SEQ ID NO: 2378 - DNA, 21 bp, Artificial Sequence
  Description of Artificial Sequence: Target Sequence/siNA antisense region (stab08)
  misc_feature (1)..(2): 2'-O-methyl
  misc_feature (3)..(4): 2'-deoxy-2'Fluoro
  misc_feature (5)..(6): 2'-O-methyl
  misc_feature (7)..(7): 2'-deoxy-2'Fluoro
  misc_feature (8)..(14): 2'-O-methyl
  misc_feature (15)..(16): 2'-deoxy-2'Fluoro
  misc_feature (17)..(17): 2'-O-methyl
  misc_feature (18)..(18): 2'-deoxy-2'Fluoro
  misc_feature (19)..(19): 2'-O-methyl
  misc_feature (20)..(20): Phosphorothioate or Phosphorodithioate 3'-Internucleotide Linkage (optionally present)
  misc_feature (1)..(19): ribonucleotide unmodified or modified as described for this sequence
aacugauggagaagcuguatt

SEQ ID NO: 2379 - DNA, 21 bp, Artificial Sequence
  Description of Artificial Sequence: Target Sequence/siNA sense region (stab09)
  misc_feature (1)..(1): 5'-3 attached terminal deoxyabasic moiety, inverted abasic, inverted nucleotide or other terminal cap that is optionally present
  misc_feature (21)..(21): 3'-3 attached terminal deoxyabasic moiety, inverted abasic, inverted nucleotide or other terminal cap that is optionally present
  misc_feature (1)..(19): ribonucleotide unmodified or modified as described for this sequence
uacagcuucuccaucaguutt

SEQ ID NO: 2380 - DNA, 21 bp, Artificial Sequence
  Description of Artificial Sequence: Target Sequence/siNA antisense region (stab10)
  misc_feature (20)..(20): Phosphorothioate or Phosphorodithioate 3'-Internucleotide Linkage (optionally present)
  misc_feature (1)..(19): ribonucleotide unmodified or modified as described for this sequence
aacugauggagaagcuguatt

SEQ ID NO: 2381 - DNA, 21 bp, Artificial Sequence
  Description of Artificial Sequence: Target Sequence/siNA antisense region (stab19)
  misc_feature (21)..(21): 3'-3 attached terminal deoxyabasic moiety, inverted abasic, inverted nucleotide or other terminal cap that is optionally present
  misc_feature (1)..(2): 2'-O-methyl
  misc_feature (3)..(4): 2'-deoxy-2'Fluoro
  misc_feature (5)..(6): 2'-O-methyl
  misc_feature (7)..(7): 2'-deoxy-2'Fluoro
  misc_feature (8)..(14): 2'-O-methyl
  misc_feature (15)..(16): 2'-deoxy-2'Fluoro
  misc_feature (17)..(17): 2'-O-methyl
  misc_feature (18)..(18): 2'-deoxy-2'Fluoro
  misc_feature (19)..(19): 2'-O-methyl
  misc_feature (1)..(19): ribonucleotide unmodified or modified as described for this sequence
aacugauggagaagcuguatt

SEQ ID NO: 2382 - DNA, 21 bp, Artificial Sequence
  Description of Artificial Sequence: Target Sequence/siNA antisense region (stab22)
  misc_feature (21)..(21): 3'-3 attached terminal deoxyabasic moiety, inverted abasic, inverted nucleotide or other terminal cap that is optionally present
  misc_feature (20)..(20): Phosphorothioate or Phosphorodithioate 3'-Internucleotide Linkage (optionally present)
  misc_feature (1)..(19): ribonucleotide unmodified or modified as described for this sequence
aacugauggagaagcuguatt

SEQ ID NO: 2383 - DNA, 21 bp, Artificial Sequence
  Description of Artificial Sequence: Target Sequence/siNA antisense region (stab25)
  misc_feature (4)..(4): 2'-deoxy-2'Fluoro
  misc_feature (5)..(6): 2'-O-methyl
  misc_feature (7)..(7): 2'-deoxy-2'Fluoro
  misc_feature (8)..(14): 2'-O-methyl
  misc_feature (15)..(16): 2'-deoxy-2'Fluoro
  misc_feature (17)..(17): 2'-O-methyl
  misc_feature (18)..(18): 2'-deoxy-2'Fluoro
  misc_feature (19)..(19): 2'-O-methyl
  misc_feature (20)..(20): Phosphorothioate or Phosphorodithioate 3'-Internucleotide Linkage (optionally present)
  misc_feature (1)..(19): ribonucleotide unmodified or modified as described for this sequence
aacugauggagaagcuguatt

SEQ ID NO: 2384 - RNA, 21 nt, Artificial Sequence
  Description of Artificial Sequence: Target Sequence/siNA antisense region (stab35)
  misc_feature (4)..(4): 2'-deoxy-2'Fluoro
  misc_feature (5)..(6): 2'-O-methyl
  misc_feature (7)..(7): 2'-deoxy-2'Fluoro
  misc_feature (8)..(14): 2'-O-methyl
  misc_feature (15)..(16): 2'-deoxy-2'Fluoro
  misc_feature (17)..(17): 2'-O-methyl
  misc_feature (18)..(18): 2'-deoxy-2'Fluoro
  misc_feature (19)..(21): 2'-O-methyl
aacugauggagaagcuguauu

SEQ ID NO: 2385 - RNA, 21 nt, Artificial Sequence
  Description of Artificial Sequence: Target Sequence/siNA antisense region (stab36)
  misc_feature (4)..(4): 2'-deoxy-2'Fluoro
  misc_feature (5)..(6): 2'-O-methyl
  misc_feature (7)..(7): 2'-deoxy-2'Fluoro
  misc_feature (8)..(14): 2'-O-methyl
  misc_feature (15)..(16): 2'-deoxy-2'Fluoro
  misc_feature (17)..(17): 2'-O-methyl
  misc_feature (18)..(18): 2'-deoxy-2'Fluoro
  misc_feature (19)..(21): 2'-O-methyl
aacugauggagaagcuguagg

SEQ ID NO: 2386 - RNA, 19 nt, Artificial Sequence
  Description of Artificial Sequence: Target Sequence/siNA sense region
uccagcauggccaccacca

SEQ ID NO: 2387 - RNA, 19 nt, Artificial Sequence
  Description of Artificial Sequence: Target Sequence/siNA antisense region
uggugguggccaugcugga

SEQ ID NO: 2388 - DNA, 21 bp, Artificial Sequence
  Description of Artificial Sequence: Target Sequence/siNA sense region (stab00)
  misc_feature (1)..(19): ribonucleotide unmodified or modified as described for this sequence
uccagcauggccaccaccatt

SEQ ID NO: 2389 - DNA, 21 bp, Artificial Sequence
  Description of Artificial Sequence: Target Sequence/siNA antisense region (stab00as)
  misc_feature (1)..(19): ribonucleotide unmodified or modified as described for this sequence
uggugguggccaugcuggatt

SEQ ID NO: 2390 - DNA, 21 bp, Artificial Sequence
  Description of Artificial Sequence: Target Sequence/siNA sense region (stab04)
  misc_feature (1)..(1): 5'-3 attached terminal deoxyabasic moiety, inverted abasic, inverted nucleotide or other terminal cap that is optionally present
  misc_feature (21)..(21): 3'-3 attached terminal deoxyabasic moiety, inverted abasic, inverted nucleotide or other terminal cap that is optionally present
  misc_feature (1)..(3): 2'-deoxy-2'Fluoro
  misc_feature (6)..(6): 2'-deoxy-2'Fluoro
  misc_feature (8)..(8): 2'-deoxy-2'Fluoro
  misc_feature (11)..(12): 2'-deoxy-2'Fluoro
  misc_feature (14)..(15): 2'-deoxy-2'Fluoro
  misc_feature (17)..(18): 2'-deoxy-2'Fluoro
  misc_feature (1)..(19): ribonucleotide unmodified or modified as described for this sequence
uccagcauggccaccaccatt

SEQ ID NO: 2391 - DNA, 21 bp, Artificial Sequence
  Description of Artificial Sequence: Target Sequence/siNA antisense region (stab05)
  misc_feature (1)..(1): 2'-deoxy-2'Fluoro
  misc_feature (4)..(4): 2'-deoxy-2'Fluoro
  misc_feature (7)..(7): 2'-deoxy-2'Fluoro
  misc_feature (10)..(11): 2'-deoxy-2'Fluoro
  misc_feature (13)..(13): 2'-deoxy-2'Fluoro
  misc_feature (15)..(16): 2'-deoxy-2'Fluoro
  misc_feature (20)..(20): Phosphorothioate or Phosphorodithioate 3'-Internucleotide Linkage (optionally present)
  misc_feature (1)..(19): ribonucleotide unmodified or modified as described for this sequence
uggugguggccaugcuggatt

SEQ ID NO: 2392 - DNA, 21 bp, Artificial Sequence
  Description of Artificial Sequence: Target Sequence/siNA sense region (stab07)
  misc_feature (1)..(1): 5'-3 attached terminal deoxyabasic moiety, inverted abasic, inverted nucleotide or other terminal cap that is optionally present
  misc_feature (21)..(21): 3'-3 attached terminal deoxyabasic moiety, inverted abasic, inverted nucleotide or other terminal cap that is optionally present
  misc_feature (1)..(3): 2'-deoxy-2'Fluoro
  misc_feature (6)..(6): 2'-deoxy-2'Fluoro
  misc_feature (8)..(8): 2'-deoxy-2'Fluoro
  misc_feature (11)..(12): 2'-deoxy-2'Fluoro
  misc_feature (14)..(15): 2'-deoxy-2'Fluoro
  misc_feature (17)..(18): 2'-deoxy-2'Fluoro
  misc_feature (1)..(19): ribonucleotide unmodified or modified as described for this sequence
uccagcauggccaccaccatt

SEQ ID NO: 2393 - DNA, 21 bp, Artificial Sequence
  Description of Artificial Sequence: Target Sequence/siNA antisense region (stab08)
  misc_feature (1)..(1): 2'-deoxy-2'Fluoro
  misc_feature (2)..(3): 2'-O-methyl
  misc_feature (4)..(4): 2'-deoxy-2'Fluoro
  misc_feature (5)..(6): 2'-O-methyl
  misc_feature (7)..(7): 2'-deoxy-2'Fluoro
  misc_feature (8)..(9): 2'-O-methyl
  misc_feature (10)..(11): 2'-deoxy-2'Fluoro
  misc_feature (12)..(12): 2'-O-methyl
  misc_feature (13)..(13): 2'-deoxy-2'Fluoro
  misc_feature (14)..(14): 2'-O-methyl
  misc_feature (15)..(16): 2'-deoxy-2'Fluoro
  misc_feature (17)..(19): 2'-O-methyl
  misc_feature (20)..(20): Phosphorothioate or Phosphorodithioate 3'-Internucleotide Linkage (optionally present)
  misc_feature (1)..(19): ribonucleotide unmodified or modified as described for this sequence
uggugguggccaugcuggatt

SEQ ID NO: 2394 - DNA, 21 bp, Artificial Sequence
  Description of Artificial Sequence: Target Sequence/siNA sense region (stab09)
  misc_feature (1)..(1): 5'-3 attached terminal deoxyabasic moiety, inverted abasic, inverted nucleotide or other terminal cap that is optionally present
  misc_feature (21)..(21): 3'-3 attached terminal deoxyabasic moiety, inverted abasic, inverted nucleotide or other terminal cap that is optionally present
  misc_feature (1)..(19): ribonucleotide unmodified or modified as described for this sequence
uccagcauggccaccaccatt

SEQ ID NO: 2395 - DNA, 21 bp, Artificial Sequence
  Description of Artificial Sequence: Target Sequence/siNA antisense region (stab10)
  misc_feature (20)..(20): Phosphorothioate or Phosphorodithioate 3'-Internucleotide Linkage (optionally present)
  misc_feature (1)..(19): ribonucleotide unmodified or modified as described for this sequence
uggugguggccaugcuggatt

SEQ ID NO: 2396 - DNA, 21 bp, Artificial Sequence
  Description of Artificial Sequence: Target Sequence/siNA antisense region (stab19)
  misc_feature (21)..(21): 3'-3 attached terminal deoxyabasic moiety, inverted abasic, inverted nucleotide or other terminal cap that is optionally present
  misc_feature (1)..(1): 2'-deoxy-2'Fluoro
  misc_feature (2)..(3): 2'-O-methyl
  misc_feature (4)..(4): 2'-deoxy-2'Fluoro
  misc_feature (5)..(6): 2'-O-methyl
  misc_feature (7)..(7): 2'-deoxy-2'Fluoro
  misc_feature (8)..(9): 2'-O-methyl
  misc_feature (10)..(11): 2'-deoxy-2'Fluoro
  misc_feature (12)..(12): 2'-O-methyl
  misc_feature (13)..(13): 2'-deoxy-2'Fluoro
  misc_feature (14)..(14): 2'-O-methyl
  misc_feature (15)..(16): 2'-deoxy-2'Fluoro
  misc_feature (17)..(19): 2'-O-methyl
  misc_feature (1)..(19): ribonucleotide unmodified or modified as described for this sequence
uggugguggccaugcuggatt

SEQ ID NO: 2397 - DNA, 21 bp, Artificial Sequence
  Description of Artificial Sequence: Target Sequence/siNA antisense region (stab22)
  misc_feature (21)..(21): 3'-3 attached terminal deoxyabasic moiety, inverted abasic, inverted nucleotide or other terminal cap that is optionally present
  misc_feature (20)..(20): Phosphorothioate or Phosphorodithioate 3'-Internucleotide Linkage (optionally present)
  misc_feature (1)..(19): ribonucleotide unmodified or modified as described for this sequence
uggugguggccaugcuggatt

SEQ ID NO: 2398 - DNA, 21 bp, Artificial Sequence
  Description of Artificial Sequence: Target Sequence/siNA antisense region (stab25)
  misc_feature (4)..(4): 2'-deoxy-2'Fluoro
  misc_feature (5)..(6): 2'-O-methyl
  misc_feature (7)..(7): 2'-deoxy-2'Fluoro
  misc_feature (8)..(9): 2'-O-methyl
  misc_feature (10)..(11): 2'-deoxy-2'Fluoro
  misc_feature (12)..(12): 2'-O-methyl
  misc_feature (13)..(13): 2'-deoxy-2'Fluoro
  misc_feature (14)..(14): 2'-O-methyl
  misc_feature (15)..(16): 2'-deoxy-2'Fluoro
  misc_feature (17)..(19): 2'-O-methyl
  misc_feature (20)..(20): Phosphorothioate or Phosphorodithioate 3'-Internucleotide Linkage (optionally present)
  misc_feature (1)..(19): ribonucleotide unmodified or modified as described for this sequence
uggugguggccaugcuggatt

SEQ ID NO: 2399 - RNA, 21 nt, Artificial Sequence
  Description of Artificial Sequence: Target Sequence/siNA antisense region (stab35)
  misc_feature (4)..(4): 2'-deoxy-2'Fluoro
  misc_feature (5)..(6): 2'-O-methyl
  misc_feature (7)..(7): 2'-deoxy-2'Fluoro
  misc_feature (8)..(9): 2'-O-methyl
  misc_feature (10)..(11): 2'-deoxy-2'Fluoro
  misc_feature (12)..(12): 2'-O-methyl
  misc_feature (13)..(13): 2'-deoxy-2'Fluoro
  misc_feature (14)..(14): 2'-O-methyl
  misc_feature (15)..(16): 2'-deoxy-2'Fluoro
  misc_feature (17)..(21): 2'-O-methyl
uggugguggccaugcuggauu

SEQ ID NO: 2400 - RNA, 21 nt, Artificial Sequence
  Description of Artificial Sequence: Target Sequence/siNA antisense region (stab36)
  misc_feature (4)..(4): 2'-deoxy-2'Fluoro
  misc_feature (5)..(6): 2'-O-methyl
  misc_feature (7)..(7): 2'-deoxy-2'Fluoro
  misc_feature (8)..(9): 2'-O-methyl
  misc_feature (10)..(11): 2'-deoxy-2'Fluoro
  misc_feature (12)..(12): 2'-O-methyl
  misc_feature (13)..(13): 2'-deoxy-2'Fluoro
  misc_feature (14)..(14): 2'-O-methyl
  misc_feature (15)..(16): 2'-deoxy-2'Fluoro
  misc_feature (17)..(21): 2'-O-methyl
uggugguggccaugcuggaac

SEQ ID NO: 2401 - RNA, 19 nt, Artificial Sequence
  Description of Artificial Sequence: Target Sequence/siNA sense region
accggcguagacccggugg

SEQ ID NO: 2402 - RNA, 19 nt, Artificial Sequence
  Description of Artificial Sequence: Target Sequence/siNA antisense region
ccaccgggucuacgccggu

SEQ ID NO: 2403 - DNA, 21 bp, Artificial Sequence
  Description of Artificial Sequence: Target Sequence/siNA sense region (stab00)
  misc_feature (1)..(19): ribonucleotide unmodified or modified as described for this sequence
accggcguagacccgguggtt

SEQ ID NO: 2404 - DNA, 21 bp, Artificial Sequence
  Description of Artificial Sequence: Target Sequence/siNA antisense region (stab00as)
  misc_feature (1)..(19): ribonucleotide unmodified or modified as described for this sequence
ccaccgggucuacgccggutt

SEQ ID NO: 2405 - DNA, 21 bp, Artificial Sequence
  Description of Artificial Sequence: Target Sequence/siNA sense region (stab04)
  misc_feature (1)..(1): 5'-3 attached terminal deoxyabasic moiety, inverted abasic, inverted nucleotide or other terminal cap that is optionally present
  misc_feature (21)..(21): 3'-3 attached terminal deoxyabasic moiety, inverted abasic, inverted nucleotide or other terminal cap that is optionally present
  misc_feature (2)..(3): 2'-deoxy-2'Fluoro
  misc_feature (6)..(6): 2'-deoxy-2'Fluoro
  misc_feature (8)..(8): 2'-deoxy-2'Fluoro
  misc_feature (12)..(14): 2'-deoxy-2'Fluoro
  misc_feature (17)..(17): 2'-deoxy-2'Fluoro
  misc_feature (1)..(19): ribonucleotide unmodified or modified as described for this sequence
accggcguagacccgguggtt

SEQ ID NO: 2406 - DNA, 21 bp, Artificial Sequence
  Description of Artificial Sequence: Target Sequence/siNA antisense region (stab05)
  misc_feature (1)..(2): 2'-deoxy-2'Fluoro
  misc_feature (4)..(5): 2'-deoxy-2'Fluoro
  misc_feature (9)..(11): 2'-deoxy-2'Fluoro
  misc_feature (13)..(13): 2'-deoxy-2'Fluoro
  misc_feature (15)..(16): 2'-deoxy-2'Fluoro
  misc_feature (19)..(19): 2'-deoxy-2'Fluoro
  misc_feature (20)..(20): Phosphorothioate or Phosphorodithioate 3'-Internucleotide Linkage (optionally present)
  misc_feature (1)..(19): ribonucleotide unmodified or modified as described for this sequence
ccaccgggucuacgccggutt

SEQ ID NO: 2407 - DNA, 21 bp, Artificial Sequence
  Description of Artificial Sequence: Target Sequence/siNA sense region (stab07)
  misc_feature (1)..(1): 5'-3 attached terminal deoxyabasic moiety, inverted abasic, inverted nucleotide or other terminal cap that is optionally present
  misc_feature (21)..(21): 3'-3 attached terminal deoxyabasic moiety, inverted abasic, inverted nucleotide or other terminal cap that is optionally present
  misc_feature (2)..(3): 2'-deoxy-2'Fluoro
  misc_feature (6)..(6): 2'-deoxy-2'Fluoro
  misc_feature (8)..(8): 2'-deoxy-2'Fluoro
  misc_feature (12)..(14): 2'-deoxy-2'Fluoro
  misc_feature (17)..(17): 2'-deoxy-2'Fluoro
  misc_feature (1)..(19): ribonucleotide unmodified or modified as described for this sequence
accggcguagacccgguggtt

SEQ ID NO: 2408 - DNA, 21 bp, Artificial Sequence
  Description of Artificial Sequence: Target Sequence/siNA antisense region (stab08)
  misc_feature (1)..(2): 2'-deoxy-2'Fluoro
  misc_feature (3)..(3): 2'-O-methyl
  misc_feature (4)..(5): 2'-deoxy-2'Fluoro
  misc_feature (6)..(8): 2'-O-methyl
  misc_feature (9)..(11): 2'-deoxy-2'Fluoro
  misc_feature (12)..(12): 2'-O-methyl
  misc_feature (13)..(13): 2'-deoxy-2'Fluoro
  misc_feature (14)..(14): 2'-O-methyl
  misc_feature (15)..(16): 2'-deoxy-2'Fluoro
  misc_feature (17)..(18): 2'-O-methyl
  misc_feature (19)..(19): 2'-deoxy-2'Fluoro
  misc_feature (20)..(20): Phosphorothioate or Phosphorodithioate 3'-Internucleotide Linkage (optionally present)
  misc_feature (1)..(19): ribonucleotide unmodified or modified as described for this sequence
ccaccgggucuacgccggutt

SEQ ID NO: 2409 - DNA, 21 bp, Artificial Sequence
  Description of Artificial Sequence: Target Sequence/siNA sense region (stab09)
  misc_feature (1)..(1): 5'-3 attached terminal deoxyabasic moiety, inverted abasic, inverted nucleotide or other terminal cap that is optionally present
  misc_feature (21)..(21): 3'-3 attached terminal deoxyabasic moiety, inverted abasic, inverted nucleotide or other terminal cap that is optionally present
  misc_feature (1)..(19): ribonucleotide unmodified or modified as described for this sequence
accggcguagacccgguggtt

SEQ ID NO: 2410 - DNA, 21 bp, Artificial Sequence
  Description of Artificial Sequence: Target Sequence/siNA antisense region (stab10)
  misc_feature (20)..(20): Phosphorothioate or Phosphorodithioate 3'-Internucleotide Linkage (optionally present)
  misc_feature (1)..(19): ribonucleotide unmodified or modified as described for this sequence
ccaccgggucuacgccggutt

SEQ ID NO: 2411 - DNA, 21 bp, Artificial Sequence
  Description of Artificial Sequence: Target Sequence/siNA antisense region (stab19)
  misc_feature (21)..(21): 3'-3 attached terminal deoxyabasic moiety, inverted abasic, inverted nucleotide or other terminal cap that is optionally present
  misc_feature (1)..(2): 2'-deoxy-2'Fluoro
  misc_feature (3)..(3): 2'-O-methyl
  misc_feature (4)..(5): 2'-deoxy-2'Fluoro
  misc_feature (6)..(8): 2'-O-methyl
  misc_feature (9)..(11): 2'-deoxy-2'Fluoro
  misc_feature (12)..(12): 2'-O-methyl
  misc_feature (13)..(13): 2'-deoxy-2'Fluoro
  misc_feature (14)..(14): 2'-O-methyl
  misc_feature (15)..(16): 2'-deoxy-2'Fluoro
  misc_feature (17)..(18): 2'-O-methyl
  misc_feature (19)..(19): 2'-deoxy-2'Fluoro
  misc_feature (1)..(19): ribonucleotide unmodified or modified as described for this sequence
ccaccgggucuacgccggutt

SEQ ID NO: 2412 - DNA, 21 bp, Artificial Sequence
  Description of Artificial Sequence: Target Sequence/siNA antisense region (stab22)
  misc_feature (21)..(21): 3'-3 attached terminal deoxyabasic moiety, inverted abasic, inverted nucleotide or other terminal cap that is optionally present
  misc_feature (20)..(20): Phosphorothioate or Phosphorodithioate 3'-Internucleotide Linkage (optionally present)
  misc_feature (1)..(19): ribonucleotide unmodified or modified as described for this sequence
ccaccgggucuacgccggutt

SEQ ID NO: 2413 - DNA, 21 bp, Artificial Sequence
  Description of Artificial Sequence: Target Sequence/siNA antisense region (stab25)
  misc_feature (4)..(5): 2'-deoxy-2'Fluoro
  misc_feature (6)..(8): 2'-O-methyl
  misc_feature (9)..(11): 2'-deoxy-2'Fluoro
  misc_feature (12)..(12): 2'-O-methyl
  misc_feature (13)..(13): 2'-deoxy-2'Fluoro
  misc_feature (14)..(14): 2'-O-methyl
  misc_feature (15)..(16): 2'-deoxy-2'Fluoro
  misc_feature (17)..(18): 2'-O-methyl
  misc_feature (19)..(19): 2'-deoxy-2'Fluoro
  misc_feature (20)..(20): Phosphorothioate or Phosphorodithioate 3'-Internucleotide Linkage (optionally present)
  misc_feature (1)..(19): ribonucleotide unmodified or modified as described for this sequence
ccaccgggucuacgccggutt

SEQ ID NO: 2414 - RNA, 21 nt, Artificial Sequence
  Description of Artificial Sequence: Target Sequence/siNA antisense region (stab35)
  misc_feature (4)..(5): 2'-deoxy-2'Fluoro
  misc_feature (6)..(8): 2'-O-methyl
  misc_feature (9)..(11): 2'-deoxy-2'Fluoro
  misc_feature (12)..(12): 2'-O-methyl
  misc_feature (13)..(13): 2'-deoxy-2'Fluoro
  misc_feature (14)..(14): 2'-O-methyl
  misc_feature (15)..(16): 2'-deoxy-2'Fluoro
  misc_feature (17)..(18): 2'-O-methyl
  misc_feature (19)..(19): 2'-deoxy-2'Fluoro
  misc_feature (20)..(21): 2'-O-methyl
ccaccgggucuacgccgguuu

SEQ ID NO: 2415 - RNA, 21 nt, Artificial Sequence
  Description of Artificial Sequence: Target Sequence/siNA antisense region (stab36)
  misc_feature (4)..(5): 2'-deoxy-2'Fluoro
  misc_feature (6)..(8): 2'-O-methyl
  misc_feature (9)..(11): 2'-deoxy-2'Fluoro
  misc_feature (12)..(12): 2'-O-methyl
  misc_feature (13)..(13): 2'-deoxy-2'Fluoro
  misc_feature (14)..(14): 2'-O-methyl
  misc_feature (15)..(16): 2'-deoxy-2'Fluoro
  misc_feature (17)..(18): 2'-O-methyl
  misc_feature (19)..(19): 2'-deoxy-2'Fluoro
  misc_feature (20)..(21): 2'-O-methyl
ccaccgggucuacgccggugg

SEQ ID NO: 2416 - RNA, 19 nt, Artificial Sequence
  Description of Artificial Sequence: Target Sequence/siNA sense region
gccaaguggugggccucuc

SEQ ID NO: 2417 - RNA, 19 nt, Artificial Sequence
  Description of Artificial Sequence: Target Sequence/siNA antisense region
gagaggcccaccacuuggc

SEQ ID NO: 2418 - DNA, 21 bp, Artificial Sequence
  Description of Artificial Sequence: Target Sequence/siNA sense region (stab00)
  misc_feature (1)..(19): ribonucleotide unmodified or modified as described for this sequence
gccaaguggugggccucuctt

SEQ ID NO: 2419 - DNA, 21 bp, Artificial Sequence
  Description of Artificial Sequence: Target Sequence/siNA antisense region (stab00as)
  misc_feature (1)..(19): ribonucleotide unmodified or modified as described for this sequence
gagaggcccaccacuuggctt

SEQ ID NO: 2420 - DNA, 21 bp, Artificial Sequence
  Description of Artificial Sequence: Target Sequence/siNA sense region (stab04)
  misc_feature (1)..(1): 5'-3 attached terminal deoxyabasic moiety, inverted abasic, inverted nucleotide or other terminal cap that is optionally present
  misc_feature (21)..(21): 3'-3 attached terminal deoxyabasic moiety, inverted abasic, inverted nucleotide or other terminal cap that is optionally present
  misc_feature (2)..(3): 2'-deoxy-2'Fluoro
  misc_feature (7)..(7): 2'-deoxy-2'Fluoro
  misc_feature (10)..(10): 2'-deoxy-2'Fluoro
  misc_feature (14)..(19): 2'-deoxy-2'Fluoro
  misc_feature (1)..(19): ribonucleotide unmodified or modified as described for this sequence
gccaaguggugggccucuctt

SEQ ID NO: 2421 - DNA, 21 bp, Artificial Sequence
  Description of Artificial Sequence: Target Sequence/siNA antisense region (stab05)
  misc_feature (7)..(9): 2'-deoxy-2'Fluoro
  misc_feature (11)..(12): 2'-deoxy-2'Fluoro
  misc_feature (14)..(16): 2'-deoxy-2'Fluoro
  misc_feature (19)..(19): 2'-deoxy-2'Fluoro
  misc_feature (20)..(20): Phosphorothioate or Phosphorodithioate 3'-Internucleotide Linkage (optionally present)
  misc_feature (1)..(19): ribonucleotide unmodified or modified as described for this sequence
gagaggcccaccacuuggctt

SEQ ID NO: 2422 - DNA, 21 bp, Artificial Sequence
  Description of Artificial Sequence: Target Sequence/siNA sense region (stab07)
  misc_feature (1)..(1): 5'-3 attached terminal deoxyabasic moiety, inverted abasic, inverted nucleotide or other terminal cap that is optionally present
  misc_feature (21)..(21): 3'-3 attached terminal deoxyabasic moiety, inverted abasic, inverted nucleotide or other terminal cap that is optionally present
  misc_feature (2)..(3): 2'-deoxy-2'Fluoro
  misc_feature (7)..(7): 2'-deoxy-2'Fluoro
  misc_feature (10)..(10): 2'-deoxy-2'Fluoro
  misc_feature (14)..(19): 2'-deoxy-2'Fluoro
  misc_feature (1)..(19): ribonucleotide unmodified or modified as described for this sequence
gccaaguggugggccucuctt

SEQ ID NO: 2423 - DNA, 21 bp, Artificial Sequence
  Description of Artificial Sequence: Target Sequence/siNA antisense region (stab08)
  misc_feature (1)..(6): 2'-O-methyl
  misc_feature (7)..(9): 2'-deoxy-2'Fluoro
  misc_feature (10)..(10): 2'-O-methyl
  misc_feature (11)..(12): 2'-deoxy-2'Fluoro
  misc_feature (13)..(13): 2'-O-methyl
  misc_feature (14)..(16): 2'-deoxy-2'Fluoro
  misc_feature (17)..(18): 2'-O-methyl
  misc_feature (19)..(19): 2'-deoxy-2'Fluoro
  misc_feature (20)..(20): Phosphorothioate or Phosphorodithioate 3'-Internucleotide Linkage (optionally present)
  misc_feature (1)..(19): ribonucleotide unmodified or modified as described for this sequence
gagaggcccaccacuuggctt

SEQ ID NO: 2424 - DNA, 21 bp, Artificial Sequence
  Description of Artificial Sequence: Target Sequence/siNA sense region (stab09)
  misc_feature (1)..(1): 5'-3 attached terminal deoxyabasic moiety, inverted abasic, inverted nucleotide or other terminal cap that is optionally present
  misc_feature (21)..(21): 3'-3 attached terminal deoxyabasic moiety, inverted abasic, inverted nucleotide or other terminal cap that is optionally present
  misc_feature (1)..(19): ribonucleotide unmodified or modified as described for this sequence
gccaaguggugggccucuctt

SEQ ID NO: 2425 - DNA, 21 bp, Artificial Sequence
  Description of Artificial Sequence: Target Sequence/siNA antisense region (stab10)
  misc_feature (20)..(20): Phosphorothioate or Phosphorodithioate 3'-Internucleotide Linkage (optionally present)
  misc_feature (1)..(19): ribonucleotide unmodified or modified as described for this sequence
gagaggcccaccacuuggctt

SEQ ID NO: 2426 - DNA, 21 bp, Artificial Sequence
  Description of Artificial Sequence: Target Sequence/siNA antisense region (stab19)
  misc_feature (21)..(21): 3'-3 attached terminal deoxyabasic moiety, inverted abasic, inverted nucleotide or other terminal cap that is optionally present
  misc_feature (1)..(6): 2'-O-methyl
  misc_feature (7)..(9): 2'-deoxy-2'Fluoro
  misc_feature (10)..(10): 2'-O-methyl
  misc_feature (11)..(12): 2'-deoxy-2'Fluoro
  misc_feature (13)..(13): 2'-O-methyl
  misc_feature (14)..(16): 2'-deoxy-2'Fluoro
  misc_feature (17)..(18): 2'-O-methyl
  misc_feature (19)..(19): 2'-deoxy-2'Fluoro
  misc_feature (1)..(19): ribonucleotide unmodified or modified as described for this sequence
gagaggcccaccacuuggctt

SEQ ID NO: 2427 - DNA, 21 bp, Artificial Sequence
  Description of Artificial Sequence: Target Sequence/siNA antisense region (stab22)
  misc_feature (21)..(21): 3'-3 attached terminal deoxyabasic moiety, inverted abasic, inverted nucleotide or other terminal cap that is optionally present
  misc_feature (20)..(20): Phosphorothioate or Phosphorodithioate 3'-Internucleotide Linkage (optionally present)
  misc_feature (1)..(19): ribonucleotide unmodified or modified as described for this sequence
gagaggcccaccacuuggctt

SEQ ID NO: 2428 - DNA, 21 bp, Artificial Sequence
  Description of Artificial Sequence: Target Sequence/siNA antisense region (stab25)
  misc_feature (4)..(6): 2'-O-methyl
  misc_feature (7)..(9): 2'-deoxy-2'Fluoro
  misc_feature (10)..(10): 2'-O-methyl
  misc_feature (11)..(12): 2'-deoxy-2'Fluoro
  misc_feature (13)..(13): 2'-O-methyl
  misc_feature (14)..(16): 2'-deoxy-2'Fluoro
  misc_feature (17)..(18): 2'-O-methyl
  misc_feature (19)..(19): 2'-deoxy-2'Fluoro
  misc_feature (20)..(20): Phosphorothioate or Phosphorodithioate 3'-Internucleotide Linkage (optionally present)
  misc_feature (1)..(19): ribonucleotide unmodified or modified as described for this sequence
gagaggcccaccacuuggctt

SEQ ID NO: 2429 - RNA, 21 nt, Artificial Sequence
  Description of Artificial Sequence: Target Sequence/siNA antisense region (stab35)
  misc_feature (4)..(6): 2'-O-methyl
  misc_feature (7)..(9): 2'-deoxy-2'Fluoro
  misc_feature (10)..(10): 2'-O-methyl
  misc_feature (11)..(12): 2'-deoxy-2'Fluoro
  misc_feature (13)..(13): 2'-O-methyl
  misc_feature (14)..(16): 2'-deoxy-2'Fluoro
  misc_feature (17)..(18): 2'-O-methyl
  misc_feature (19)..(19): 2'-deoxy-2'Fluoro
  misc_feature (20)..(21): 2'-O-methyl
gagaggcccaccacuuggcuu

SEQ ID NO: 2430 - RNA, 21 nt, Artificial Sequence
  Description of Artificial Sequence: Target Sequence/siNA antisense region (stab36)
  misc_feature (4)..(6): 2'-O-methyl
  misc_feature (7)..(9): 2'-deoxy-2'Fluoro
  misc_feature (10)..(10): 2'-O-methyl
  misc_feature (11)..(12): 2'-deoxy-2'Fluoro
  misc_feature (13)..(13): 2'-O-methyl
  misc_feature (14)..(16): 2'-deoxy-2'Fluoro
  misc_feature (17)..(18): 2'-O-methyl
  misc_feature (19)..(19): 2'-deoxy-2'Fluoro
  misc_feature (20)..(21): 2'-O-methyl
gagaggcccaccacuuggcca

SEQ ID NO: 2431 - RNA, 19 nt, Artificial Sequence
  Description of Artificial Sequence: Target Sequence/siNA sense region
cugacagcuguggugaucc

SEQ ID NO: 2432 - RNA, 19 nt, Artificial Sequence
  Description of Artificial Sequence: Target Sequence/siNA antisense region
ggaucaccacagcugucag

SEQ ID NO: 2433 - DNA, 21 bp, Artificial Sequence
  Description of Artificial Sequence: Target Sequence/siNA sense region (stab00)
  misc_feature (1)..(19): ribonucleotide unmodified or modified as described for this sequence
cugacagcuguggugaucctt

SEQ ID NO: 2434 - DNA, 21 bp, Artificial Sequence
  Description of Artificial Sequence: Target Sequence/siNA antisense region (stab00as)
  misc_feature (1)..(19): ribonucleotide unmodified or modified as described for this sequence
ggaucaccacagcugucagtt

SEQ ID NO: 2435 - DNA, 21 bp, Artificial Sequence
  Description of Artificial Sequence: Target Sequence/siNA sense region (stab04)
  misc_feature (1)..(1): 5'-3 attached terminal deoxyabasic moiety, inverted abasic, inverted nucleotide or other terminal cap that is optionally present
  misc_feature (21)..(21): 3'-3 attached terminal deoxyabasic moiety, inverted abasic, inverted nucleotide or other terminal cap that is optionally present
  misc_feature (1)..(2): 2'-deoxy-2'Fluoro
  misc_feature (5)..(5): 2'-deoxy-2'Fluoro
  misc_feature (8)..(9): 2'-deoxy-2'Fluoro
  misc_feature (11)..(11): 2'-deoxy-2'Fluoro
  misc_feature (14)..(14): 2'-deoxy-2'Fluoro
  misc_feature (17)..(19): 2'-deoxy-2'Fluoro
  misc_feature (1)..(19): ribonucleotide unmodified or modified as described for this sequence
cugacagcuguggugaucctt

SEQ ID NO: 2436 - DNA, 21 bp, Artificial Sequence
  Description of Artificial Sequence: Target Sequence/siNA antisense region (stab05)
  misc_feature (4)..(5): 2'-deoxy-2'Fluoro
  misc_feature (7)..(8): 2'-deoxy-2'Fluoro
  misc_feature (10)..(10): 2'-deoxy-2'Fluoro
  misc_feature (13)..(14): 2'-deoxy-2'Fluoro
  misc_feature (16)..(17): 2'-deoxy-2'Fluoro
  misc_feature (20)..(20): Phosphorothioate or Phosphorodithioate 3'-Internucleotide Linkage (optionally present)
  misc_feature (1)..(19): ribonucleotide unmodified or modified as described for this sequence
ggaucaccacagcugucagtt

SEQ ID NO: 2437 - DNA, 21 bp, Artificial Sequence
  Description of Artificial Sequence: Target Sequence/siNA sense region (stab07)
  misc_feature (1)..(1): 5'-3 attached terminal deoxyabasic moiety, inverted abasic, inverted nucleotide or other terminal cap that is optionally present
  misc_feature (21)..(21): 3'-3 attached terminal deoxyabasic moiety, inverted abasic, inverted nucleotide or other terminal cap that is optionally present
  misc_feature (1)..(2): 2'-deoxy-2'Fluoro
  misc_feature (5)..(5): 2'-deoxy-2'Fluoro
  misc_feature (8)..(9): 2'-deoxy-2'Fluoro
  misc_feature (11)..(11): 2'-deoxy-2'Fluoro
  misc_feature (14)..(14): 2'-deoxy-2'Fluoro
  misc_feature (17)..(19): 2'-deoxy-2'Fluoro
  misc_feature (1)..(19): ribonucleotide unmodified or modified as described for this sequence
cugacagcuguggugaucctt

SEQ ID NO: 2438 - DNA, 21 bp, Artificial Sequence
  Description of Artificial Sequence: Target Sequence/siNA antisense region (stab08)
  misc_feature (1)..(3): 2'-O-methyl
  misc_feature (4)..(5): 2'-deoxy-2'Fluoro
  misc_feature (6)..(6): 2'-O-methyl
  misc_feature (7)..(8): 2'-deoxy-2'Fluoro
  misc_feature (9)..(9): 2'-O-methyl
  misc_feature (10)..(10): 2'-deoxy-2'Fluoro
  misc_feature (11)..(12): 2'-O-methyl
  misc_feature (13)..(14): 2'-deoxy-2'Fluoro
  misc_feature (15)..(15): 2'-O-methyl
  misc_feature (16)..(17): 2'-deoxy-2'Fluoro
  misc_feature (18)..(19): 2'-O-methyl
  misc_feature (20)..(20): Phosphorothioate or Phosphorodithioate 3'-Internucleotide Linkage (optionally present)
  misc_feature (1)..(19): ribonucleotide unmodified or modified as described for this sequence
ggaucaccacagcugucagtt

SEQ ID NO: 2439 - DNA, 21 bp, Artificial Sequence
  Description of Artificial Sequence: Target Sequence/siNA sense region (stab09)
  misc_feature (1)..(1): 5'-3 attached terminal deoxyabasic moiety, inverted abasic, inverted nucleotide or other terminal cap that is optionally present
  misc_feature (21)..(21): 3'-3 attached terminal deoxyabasic moiety, inverted abasic, inverted nucleotide or other terminal cap that is optionally present
  misc_feature (1)..(19): ribonucleotide unmodified or modified as described for this sequence
cugacagcuguggugaucctt

SEQ ID NO: 2440 - DNA, 21 bp, Artificial Sequence
  Description of Artificial Sequence: Target Sequence/siNA antisense region (stab10)
  misc_feature (20)..(20): Phosphorothioate or Phosphorodithioate 3'-Internucleotide Linkage (optionally present)
  misc_feature (1)..(19): ribonucleotide unmodified or modified as described for this sequence
ggaucaccacagcugucagtt

SEQ ID NO: 2441 - DNA, 21 bp, Artificial Sequence
  Description of Artificial Sequence: Target Sequence/siNA antisense region (stab19)
  misc_feature (21)..(21): 3'-3 attached terminal deoxyabasic moiety, inverted abasic, inverted nucleotide or other terminal cap that is optionally present
  misc_feature (1)..(3): 2'-O-methyl
  misc_feature (4)..(5): 2'-deoxy-2'Fluoro
  misc_feature (6)..(6): 2'-O-methyl
  misc_feature (7)..(8): 2'-deoxy-2'Fluoro
  misc_feature (9)..(9): 2'-O-methyl
  misc_feature (10)..(10): 2'-deoxy-2'Fluoro
  misc_feature (11)..(12): 2'-O-methyl
  misc_feature (13)..(14): 2'-deoxy-2'Fluoro
  misc_feature (15)..(15): 2'-O-methyl
  misc_feature (16)..(17): 2'-deoxy-2'Fluoro
  misc_feature (18)..(19): 2'-O-methyl
  misc_feature (1)..(19): ribonucleotide unmodified or modified as described for this sequence
ggaucaccacagcugucagtt

SEQ ID NO: 2442 - DNA, 21 bp, Artificial Sequence
  Description of Artificial Sequence: Target Sequence/siNA antisense region (stab22)
  misc_feature (21)..(21): 3'-3 attached terminal deoxyabasic moiety, inverted abasic, inverted nucleotide or other terminal cap that is optionally present
  misc_feature (20)..(20): Phosphorothioate or Phosphorodithioate 3'-Internucleotide Linkage (optionally present)
  misc_feature (1)..(19): ribonucleotide unmodified or modified as described for this sequence
ggaucaccacagcugucagtt

SEQ ID NO: 2443 - DNA, 21 bp, Artificial Sequence
  Description of Artificial Sequence: Target Sequence/siNA antisense region (stab25)
  misc_feature (4)..(5): 2'-deoxy-2'Fluoro
  misc_feature (6)..(6): 2'-O-methyl
  misc_feature (7)..(8): 2'-deoxy-2'Fluoro
  misc_feature (9)..(9): 2'-O-methyl
  misc_feature (10)..(10): 2'-deoxy-2'Fluoro
  misc_feature (11)..(12): 2'-O-methyl
  misc_feature (13)..(14): 2'-deoxy-2'Fluoro
  misc_feature (15)..(15): 2'-O-methyl
  misc_feature (16)..(17): 2'-deoxy-2'Fluoro
  misc_feature (18)..(19): 2'-O-methyl
  misc_feature (20)..(20): Phosphorothioate or Phosphorodithioate 3'-Internucleotide Linkage (optionally present)
  misc_feature (1)..(19): ribonucleotide unmodified or modified as described for this sequence
ggaucaccacagcugucagtt

SEQ ID NO: 2444 - RNA, 21 nt, Artificial Sequence
  Description of Artificial Sequence: Target Sequence/siNA antisense region (stab35)
  misc_feature (4)..(5): 2'-deoxy-2'Fluoro
  misc_feature (6)..(6): 2'-O-methyl
  misc_feature (7)..(8): 2'-deoxy-2'Fluoro
  misc_feature (9)..(9): 2'-O-methyl
  misc_feature (10)..(10): 2'-deoxy-2'Fluoro
  misc_feature (11)..(12): 2'-O-methyl
  misc_feature (13)..(14): 2'-deoxy-2'Fluoro
  misc_feature (15)..(15): 2'-O-methyl
  misc_feature (16)..(17): 2'-deoxy-2'Fluoro
  misc_feature (18)..(21): 2'-O-methyl
ggaucaccacagcugucaguu

SEQ ID NO: 2445 - RNA, 21 nt, Artificial Sequence
  Description of Artificial Sequence: Target Sequence/siNA antisense region (stab36)
  misc_feature (4)..(5): 2'-deoxy-2'Fluoro
  misc_feature (6)..(6): 2'-O-methyl
  misc_feature (7)..(8): 2'-deoxy-2'Fluoro
  misc_feature (9)..(9): 2'-O-methyl
  misc_feature (10)..(10): 2'-deoxy-2'Fluoro
  misc_feature (11)..(12): 2'-O-methyl
  misc_feature (13)..(14): 2'-deoxy-2'Fluoro
  misc_feature (15)..(15): 2'-O-methyl
  misc_feature (16)..(17): 2'-deoxy-2'Fluoro
  misc_feature (18)..(21): 2'-O-methyl
ggaucaccacagcugucagag

SEQ ID NO: 2446 - RNA, 19 nt, Artificial Sequence
  Description of Artificial Sequence: Target Sequence/siNA sense region
cacuggcugcggcgggaug

SEQ ID NO: 2447 - RNA, 19 nt, Artificial Sequence
  Description of Artificial Sequence: Target Sequence/siNA antisense region
caucccgccgcagccagug

SEQ ID NO: 2448 - DNA, 21 bp, Artificial Sequence
  Description of Artificial Sequence: Target Sequence/siNA sense region (stab00)
  misc_feature (1)..(19): ribonucleotide unmodified or modified as described for this sequence
cacuggcugcggcgggaugtt

SEQ ID NO: 2449 - DNA, 21 bp, Artificial Sequence
  Description of Artificial Sequence: Target Sequence/siNA antisense region (stab00as)
  misc_feature (1)..(19): ribonucleotide unmodified or modified as described for this sequence
caucccgccgcagccagugtt

SEQ ID NO: 2450 - DNA, 21 bp, Artificial Sequence
  Description of Artificial Sequence: Target Sequence/siNA sense region (stab04)
  misc_feature (1)..(1): 5'-3 attached terminal deoxyabasic moiety, inverted abasic, inverted nucleotide or other terminal cap that is optionally present
  misc_feature (21)..(21): 3'-3 attached terminal deoxyabasic moiety, inverted abasic, inverted nucleotide or other terminal cap that is optionally present
  misc_feature (1)..(1): 2'-deoxy-2'Fluoro
  misc_feature (3)..(4): 2'-deoxy-2'Fluoro
  misc_feature (7)..(8): 2'-deoxy-2'Fluoro
  misc_feature (10)..(10): 2'-deoxy-2'Fluoro
  misc_feature (13)..(13): 2'-deoxy-2'Fluoro
  misc_feature (18)..(18): 2'-deoxy-2'Fluoro
  misc_feature (1)..(19): ribonucleotide unmodified or modified as described for this sequence
cacuggcugcggcgggaugtt

SEQ ID NO: 2451 - DNA, 21 bp, Artificial Sequence
  Description of Artificial Sequence: Target Sequence/siNA antisense region (stab05)
  misc_feature (1)..(1): 2'-deoxy-2'Fluoro
  misc_feature (3)..(6): 2'-deoxy-2'Fluoro
  misc_feature (8)..(9): 2'-deoxy-2'Fluoro
  misc_feature (11)..(11): 2'-deoxy-2'Fluoro
  misc_feature (14)..(15): 2'-deoxy-2'Fluoro
  misc_feature (18)..(18): 2'-deoxy-2'Fluoro
  misc_feature (20)..(20): Phosphorothioate or Phosphorodithioate 3'-Internucleotide Linkage (optionally present)
  misc_feature (1)..(19): ribonucleotide unmodified or modified as described for this sequence
caucccgccgcagccagugtt

SEQ ID NO: 2452 - DNA, 21 bp, Artificial Sequence
  Description of Artificial Sequence: Target Sequence/siNA sense region (stab07)
  misc_feature (1)..(1): 5'-3 attached terminal deoxyabasic moiety, inverted abasic, inverted nucleotide or other terminal cap that is optionally present
  misc_feature (21)..(21): 3'-3 attached terminal deoxyabasic moiety, inverted abasic, inverted nucleotide or other terminal cap that is optionally present
  misc_feature (1)..(1): 2'-deoxy-2'Fluoro
  misc_feature (3)..(4): 2'-deoxy-2'Fluoro
  misc_feature (7)..(8): 2'-deoxy-2'Fluoro
  misc_feature (10)..(10): 2'-deoxy-2'Fluoro
  misc_feature (13)..(13): 2'-deoxy-2'Fluoro
  misc_feature (18)..(18): 2'-deoxy-2'Fluoro
  misc_feature (1)..(19): ribonucleotide unmodified or modified as described for this sequence
cacuggcugcggcgggaugtt

SEQ ID NO: 2453 - DNA, 21 bp, Artificial Sequence
  Description of Artificial Sequence: Target Sequence/siNA antisense region (stab08)
  misc_feature (1)..(1): 2'-deoxy-2'Fluoro
  misc_feature (2)..(2): 2'-O-methyl
  misc_feature (3)..(6): 2'-deoxy-2'Fluoro
  misc_feature (7)..(7): 2'-O-methyl
  misc_feature (8)..(9): 2'-deoxy-2'Fluoro
  misc_feature (10)..(10): 2'-O-methyl
  misc_feature (11)..(11): 2'-deoxy-2'Fluoro
  misc_feature (12)..(13): 2'-O-methyl
  misc_feature (14)..(15): 2'-deoxy-2'Fluoro
  misc_feature (16)..(17): 2'-O-methyl
  misc_feature (18)..(18): 2'-deoxy-2'Fluoro
  misc_feature (19)..(19): 2'-O-methyl
  misc_feature (20)..(20): Phosphorothioate or Phosphorodithioate 3'-Internucleotide Linkage (optionally present)
  misc_feature (1)..(19): ribonucleotide unmodified or modified as described for this sequence
caucccgccgcagccagugtt

SEQ ID NO: 2454 - DNA, 21 bp, Artificial Sequence
  Description of Artificial Sequence: Target Sequence/siNA sense region (stab09)
  misc_feature (1)..(1): 5'-3 attached terminal deoxyabasic moiety, inverted abasic, inverted nucleotide or other terminal cap that is optionally present
  misc_feature (21)..(21): 3'-3 attached terminal deoxyabasic moiety, inverted abasic, inverted nucleotide or other terminal cap that is optionally present
  misc_feature (1)..(19): ribonucleotide unmodified or modified as described for this sequence
cacuggcugcggcgggaugtt

SEQ ID NO: 2455 - DNA, 21 bp, Artificial Sequence
  Description of Artificial Sequence: Target Sequence/siNA antisense region (stab10)
  misc_feature (20)..(20): Phosphorothioate or Phosphorodithioate 3'-Internucleotide Linkage (optionally present)
  misc_feature (1)..(19): ribonucleotide unmodified or modified as described for this sequence
caucccgccgcagccagugtt

SEQ ID NO: 2456 - DNA, 21 bp, Artificial Sequence
  Description of Artificial Sequence: Target Sequence/siNA antisense region (stab19)
  misc_feature (21)..(21): 3'-3 attached terminal deoxyabasic moiety, inverted abasic, inverted nucleotide or other terminal cap that is optionally present
  misc_feature (1)..(1): 2'-deoxy-2'Fluoro
  misc_feature (2)..(2): 2'-O-methyl
  misc_feature (3)..(6): 2'-deoxy-2'Fluoro
  misc_feature (7)..(7): 2'-O-methyl
  misc_feature (8)..(9): 2'-deoxy-2'Fluoro
  misc_feature (10)..(10): 2'-O-methyl
  misc_feature (11)..(11): 2'-deoxy-2'Fluoro
  misc_feature (12)..(13): 2'-O-methyl
  misc_feature (14)..(15): 2'-deoxy-2'Fluoro
  misc_feature (16)..(17): 2'-O-methyl
  misc_feature (18)..(18): 2'-deoxy-2'Fluoro
  misc_feature (19)..(19): 2'-O-methyl
  misc_feature (1)..(19): ribonucleotide unmodified or modified as described for this sequence
caucccgccgcagccagugtt

SEQ ID NO: 2457 - DNA, 21 bp, Artificial Sequence
  Description of Artificial Sequence: Target Sequence/siNA antisense region (stab22)
  misc_feature (21)..(21): 3'-3 attached terminal deoxyabasic moiety, inverted abasic, inverted nucleotide or other terminal cap that is optionally present
  misc_feature (20)..(20): Phosphorothioate or Phosphorodithioate 3'-Internucleotide Linkage (optionally present)
  misc_feature (1)..(19): ribonucleotide unmodified or modified as described for this sequence
caucccgccgcagccagugtt

SEQ ID NO: 2458 - DNA, 21 bp, Artificial Sequence
  Description of Artificial Sequence: Target Sequence/siNA antisense region (stab25)
  misc_feature (4)..(6): 2'-deoxy-2'Fluoro
  misc_feature (7)..(7): 2'-O-methyl
  misc_feature (8)..(9): 2'-deoxy-2'Fluoro
  misc_feature (10)..(10): 2'-O-methyl
  misc_feature (11)..(11): 2'-deoxy-2'Fluoro
  misc_feature (12)..(13): 2'-O-methyl
  misc_feature (14)..(15): 2'-deoxy-2'Fluoro
  misc_feature (16)..(17): 2'-O-methyl
  misc_feature (18)..(18): 2'-deoxy-2'Fluoro
  misc_feature (19)..(19): 2'-O-methyl
  misc_feature (20)..(20): Phosphorothioate or Phosphorodithioate 3'-Internucleotide Linkage (optionally present)
  misc_feature (1)..(19): ribonucleotide unmodified or modified as described for this sequence
caucccgccgcagccagugtt

SEQ ID NO: 2459 - RNA, 21 nt, Artificial Sequence
  Description of Artificial Sequence: Target Sequence/siNA antisense region (stab35)
  misc_feature (4)..(6): 2'-deoxy-2'Fluoro
  misc_feature (7)..(7): 2'-O-methyl
  misc_feature (8)..(9): 2'-deoxy-2'Fluoro
  misc_feature (10)..(10): 2'-O-methyl
  misc_feature (11)..(11): 2'-deoxy-2'Fluoro
  misc_feature (12)..(13): 2'-O-methyl
  misc_feature (14)..(15): 2'-deoxy-2'Fluoro
  misc_feature (16)..(17): 2'-O-methyl
  misc_feature (18)..(18): 2'-deoxy-2'Fluoro
  misc_feature (19)..(21): 2'-O-methyl
caucccgccgcagccaguguu

SEQ ID NO: 2460 - RNA, 21 nt, Artificial Sequence
  Description of Artificial Sequence: Target Sequence/siNA antisense region (stab36)
  misc_feature (4)..(6): 2'-deoxy-2'Fluoro
  misc_feature (7)..(7): 2'-O-methyl
  misc_feature (8)..(9): 2'-deoxy-2'Fluoro
  misc_feature (10)..(10): 2'-O-methyl
  misc_feature (11)..(11): 2'-deoxy-2'Fluoro
  misc_feature (12)..(13): 2'-O-methyl
  misc_feature (14)..(15): 2'-deoxy-2'Fluoro
  misc_feature (16)..(17): 2'-O-methyl
  misc_feature (18)..(18): 2'-deoxy-2'Fluoro
  misc_feature (19)..(21): 2'-O-methyl
caucccgccgcagccagugga

SEQ ID NO: 2461 - RNA, 19 nt, Artificial Sequence
  Description of Artificial Sequence: Target Sequence/siNA sense region
gaggaggcggcugagcggc

SEQ ID NO: 2462 - RNA, 19 nt, Artificial Sequence
  Description of Artificial Sequence: Target Sequence/siNA antisense region
gccgcucagccgccuccuc

SEQ ID NO: 2463 - DNA, 21 bp, Artificial Sequence
  Description of Artificial Sequence: Target Sequence/siNA sense region (stab00)
  misc_feature (1)..(19): ribonucleotide unmodified or modified as described for this sequence
gaggaggcggcugagcggctt

SEQ ID NO: 2464 - DNA, 21 bp, Artificial Sequence
  Description of Artificial Sequence: Target Sequence/siNA antisense region (stab00as)
  misc_feature (1)..(19): ribonucleotide unmodified or modified as described for this sequence
gccgcucagccgccuccuctt

SEQ ID NO: 2465 - DNA, 21 bp, Artificial Sequence
  Description of Artificial Sequence: Target Sequence/siNA sense region (stab04)
  misc_feature (1)..(1): 5'-3 attached terminal deoxyabasic moiety, inverted abasic, inverted nucleotide or other terminal cap that is optionally present
  misc_feature (21)..(21): 3'-3 attached terminal deoxyabasic moiety, inverted abasic, inverted nucleotide or other terminal cap that is optionally present
  misc_feature (8)..(8): 2'-deoxy-2'Fluoro
  misc_feature (11)..(12): 2'-deoxy-2'Fluoro
  misc_feature (16)..(16): 2'-deoxy-2'Fluoro
  misc_feature (19)..(19): 2'-deoxy-2'Fluoro
  misc_feature (1)..(19): ribonucleotide unmodified or modified as described for this sequence
gaggaggcggcugagcggctt

SEQ ID NO: 2466 - DNA, 21 bp, Artificial Sequence
  Description of Artificial Sequence: Target Sequence/siNA antisense region (stab05)
  misc_feature (2)..(3): 2'-deoxy-2'Fluoro
  misc_feature (5)..(7): 2'-deoxy-2'Fluoro
  misc_feature (10)..(11): 2'-deoxy-2'Fluoro
  misc_feature (13)..(19): 2'-deoxy-2'Fluoro
  misc_feature (20)..(20): Phosphorothioate or Phosphorodithioate 3'-Internucleotide Linkage (optionally present)
  misc_feature (1)..(19): ribonucleotide unmodified or modified as described for this sequence
gccgcucagccgccuccuctt

SEQ ID NO: 2467 - DNA, 21 bp, Artificial Sequence
  Description of Artificial Sequence: Target Sequence/siNA sense region (stab07)
  misc_feature (1)..(1): 5'-3 attached terminal deoxyabasic moiety, inverted abasic, inverted nucleotide or other terminal cap that is optionally present
  misc_feature (21)..(21): 3'-3 attached terminal deoxyabasic moiety, inverted abasic, inverted nucleotide or other terminal cap that is optionally present
  misc_feature (8)..(8): 2'-deoxy-2'Fluoro
  misc_feature (11)..(12): 2'-deoxy-2'Fluoro
  misc_feature (16)..(16): 2'-deoxy-2'Fluoro
  misc_feature (19)..(19): 2'-deoxy-2'Fluoro
  misc_feature (1)..(19): ribonucleotide unmodified or modified as described for this sequence
gaggaggcggcugagcggctt

SEQ ID NO: 2468 - DNA, 21 bp, Artificial Sequence
  Description of Artificial Sequence: Target Sequence/siNA antisense region (stab08)
  misc_feature (1)..(1): 2'-O-methyl
  misc_feature (2)..(3): 2'-deoxy-2'Fluoro
  misc_feature (4)..(4): 2'-O-methyl
  misc_feature (5)..(7): 2'-deoxy-2'Fluoro
  misc_feature (8)..(9): 2'-O-methyl
  misc_feature (10)..(11): 2'-deoxy-2'Fluoro
  misc_feature (12)..(12): 2'-O-methyl
  misc_feature (13)..(19): 2'-deoxy-2'Fluoro
  misc_feature (20)..(20): Phosphorothioate or Phosphorodithioate 3'-Internucleotide Linkage (optionally present)
  misc_feature (1)..(19): ribonucleotide unmodified or modified as described for this sequence
gccgcucagccgccuccuctt

SEQ ID NO: 2469 - DNA, 21 bp, Artificial Sequence
  Description of Artificial Sequence: Target Sequence/siNA sense region (stab09)
  misc_feature (1)..(1): 5'-3 attached terminal deoxyabasic moiety, inverted abasic, inverted nucleotide or other terminal cap that is optionally present
  misc_feature (21)..(21): 3'-3 attached terminal deoxyabasic moiety, inverted abasic, inverted nucleotide or other terminal cap that is optionally present
  misc_feature (1)..(19): ribonucleotide unmodified or modified as described for this sequence
gaggaggcggcugagcggctt

SEQ ID NO: 2470 - DNA, 21 bp, Artificial Sequence
  Description of Artificial Sequence: Target Sequence/siNA antisense region (stab10)
  misc_feature (20)..(20): Phosphorothioate or Phosphorodithioate 3'-Internucleotide Linkage (optionally present)
  misc_feature (1)..(19): ribonucleotide unmodified or modified as described for this sequence
gccgcucagccgccuccuctt

SEQ ID NO: 2471 - DNA, 21 bp, Artificial Sequence
  Description of Artificial Sequence: Target Sequence/siNA antisense region (stab19)
  misc_feature (21)..(21): 3'-3 attached terminal deoxyabasic moiety, inverted abasic, inverted nucleotide or other terminal cap that is optionally present
  misc_feature (1)..(1): 2'-O-methyl
  misc_feature (2)..(3): 2'-deoxy-2'Fluoro
  misc_feature (4)..(4): 2'-O-methyl
  misc_feature (5)..(7): 2'-deoxy-2'Fluoro
  misc_feature (8)..(9): 2'-O-methyl
  misc_feature (10)..(11): 2'-deoxy-2'Fluoro
  misc_feature (12)..(12): 2'-O-methyl
  misc_feature (13)..(19): 2'-deoxy-2'Fluoro
  misc_feature (1)..(19): ribonucleotide unmodified or modified as described for this sequence
gccgcucagccgccuccuctt

SEQ ID NO: 2472 - DNA, 21 bp, Artificial Sequence
  Description of Artificial Sequence: Target Sequence/siNA antisense region (stab22)
  misc_feature (21)..(21): 3'-3 attached terminal deoxyabasic moiety, inverted abasic, inverted nucleotide or other terminal cap that is optionally present
  misc_feature (20)..(20): Phosphorothioate or Phosphorodithioate 3'-Internucleotide Linkage (optionally present)
  misc_feature (1)..(19): ribonucleotide unmodified or modified as described for this sequence
gccgcucagccgccuccuctt

SEQ ID NO: 2473 - DNA, 21 bp, Artificial Sequence
  Description of Artificial Sequence: Target Sequence/siNA antisense region (stab25)
  misc_feature (4)..(4): 2'-O-methyl
  misc_feature (5)..(7): 2'-deoxy-2'Fluoro
  misc_feature (8)..(9): 2'-O-methyl
  misc_feature (10)..(11): 2'-deoxy-2'Fluoro
  misc_feature (12)..(12): 2'-O-methyl
  misc_feature (13)..(19): 2'-deoxy-2'Fluoro
  misc_feature (20)..(20): Phosphorothioate or Phosphorodithioate 3'-Internucleotide Linkage (optionally present)
  misc_feature (1)..(19): ribonucleotide unmodified or modified as described for this sequence
gccgcucagccgccuccuctt

SEQ ID NO: 2474 - RNA, 21 nt, Artificial Sequence
  Description of Artificial Sequence: Target Sequence/siNA antisense region (stab35)
  misc_feature (4)..(4): 2'-O-methyl
  misc_feature (5)..(7): 2'-deoxy-2'Fluoro
  misc_feature (8)..(9): 2'-O-methyl
  misc_feature (10)..(11): 2'-deoxy-2'Fluoro
  misc_feature (12)..(12): 2'-O-methyl
  misc_feature (13)..(19): 2'-deoxy-2'Fluoro
  misc_feature (20)..(21): 2'-O-methyl
gccgcucagccgccuccucuu

SEQ ID NO: 2475 - RNA, 21 nt, Artificial Sequence
  Description of Artificial Sequence: Target Sequence/siNA antisense region (stab36)
  misc_feature (4)..(4): 2'-O-methyl
  misc_feature (5)..(7): 2'-deoxy-2'Fluoro
  misc_feature (8)..(9): 2'-O-methyl
  misc_feature (10)..(11): 2'-deoxy-2'Fluoro
  misc_feature (12)..(12): 2'-O-methyl
  misc_feature (13)..(19): 2'-deoxy-2'Fluoro
  misc_feature (20)..(21): 2'-O-methyl
gccgcucagccgccuccucau

SEQ ID NO: 2476 - RNA, 19 nt, Artificial Sequence
  Description of Artificial Sequence: Target Sequence/siNA sense region
cugugcccgcugguggagc

SEQ ID NO: 2477 - RNA, 19 nt, Artificial Sequence
  Description of Artificial Sequence: Target Sequence/siNA antisense region
gcuccaccagcgggcacag

SEQ ID NO: 2478 - DNA, 21 bp, Artificial Sequence
  Description of Artificial Sequence: Target Sequence/siNA sense region (stab00)
  misc_feature (1)..(19): ribonucleotide unmodified or modified as described for this sequence
cugugcccgcugguggagctt

SEQ ID NO: 2479 - DNA, 21 bp, Artificial Sequence
  Description of Artificial Sequence: Target Sequence/siNA antisense region (stab00as)
  misc_feature (1)..(19): ribonucleotide unmodified or modified as described for this sequence
gcuccaccagcgggcacagtt

SEQ ID NO: 2480 - DNA, 21 bp, Artificial Sequence
  Description of Artificial Sequence: Target Sequence/siNA sense region (stab04)
  misc_feature (1)..(1): 5'-3 attached terminal deoxyabasic moiety, inverted abasic, inverted nucleotide or other terminal cap that is optionally present
  misc_feature (21)..(21): 3'-3 attached terminal deoxyabasic moiety, inverted abasic, inverted nucleotide or other terminal cap that is optionally present
  misc_feature (1)..(2): 2'-deoxy-2'Fluoro
  misc_feature (4)..(4): 2'-deoxy-2'Fluoro
  misc_feature (6)..(8): 2'-deoxy-2'Fluoro
  misc_feature (10)..(11): 2'-deoxy-2'Fluoro
  misc_feature (14)..(14): 2'-deoxy-2'Fluoro
  misc_feature (19)..(19): 2'-deoxy-2'Fluoro
  misc_feature (1)..(19): ribonucleotide unmodified or modified as described for this sequence
cugugcccgcugguggagctt

SEQ ID NO: 2481 - DNA, 21 bp, Artificial Sequence
  Description of Artificial Sequence: Target Sequence/siNA antisense region (stab05)
  misc_feature (2)..(5): 2'-deoxy-2'Fluoro
  misc_feature (7)..(8): 2'-deoxy-2'Fluoro
  misc_feature (11)..(11): 2'-deoxy-2'Fluoro
  misc_feature (15)..(15): 2'-deoxy-2'Fluoro
  misc_feature (17)..(17): 2'-deoxy-2'Fluoro
  misc_feature (20)..(20): Phosphorothioate or Phosphorodithioate 3'-Internucleotide Linkage (optionally present)
  misc_feature (1)..(19): ribonucleotide unmodified or modified as described for this sequence
gcuccaccagcgggcacagtt

SEQ ID NO: 2482 - DNA, 21 bp, Artificial Sequence
  Description of Artificial Sequence: Target Sequence/siNA sense region (stab07)
  misc_feature (1)..(1): 5'-3 attached terminal deoxyabasic moiety, inverted abasic, inverted nucleotide or other terminal cap that is optionally present
  misc_feature (21)..(21): 3'-3 attached terminal deoxyabasic moiety, inverted abasic, inverted nucleotide or other terminal cap that is optionally present
  misc_feature (1)..(2): 2'-deoxy-2'Fluoro
  misc_feature (4)..(4): 2'-deoxy-2'Fluoro
  misc_feature (6)..(8): 2'-deoxy-2'Fluoro
  misc_feature (10)..(11): 2'-deoxy-2'Fluoro
  misc_feature (14)..(14): 2'-deoxy-2'Fluoro
  misc_feature (19)..(19): 2'-deoxy-2'Fluoro
  misc_feature (1)..(19): ribonucleotide unmodified or modified as described for this sequence
cugugcccgcugguggagctt

SEQ ID NO: 2483 - DNA, 21 bp, Artificial Sequence
  Description of Artificial Sequence: Target Sequence/siNA antisense region (stab08)
  misc_feature (1)..(1): 2'-O-methyl
  misc_feature (2)..(5): 2'-deoxy-2'Fluoro
  misc_feature (6)..(6): 2'-O-methyl
  misc_feature (7)..(8): 2'-deoxy-2'Fluoro
  misc_feature (9)..(10): 2'-O-methyl
  misc_feature (11)..(11): 2'-deoxy-2'Fluoro
  misc_feature (12)..(14): 2'-O-methyl
  misc_feature (15)..(15): 2'-deoxy-2'Fluoro
  misc_feature (16)..(16): 2'-O-methyl
  misc_feature (17)..(17): 2'-deoxy-2'Fluoro
  misc_feature (18)..(19): 2'-O-methyl
  misc_feature (20)..(20): Phosphorothioate or Phosphorodithioate 3'-Internucleotide Linkage (optionally present)
  misc_feature (1)..(19): ribonucleotide unmodified or modified as described for this sequence
gcuccaccagcgggcacagtt

SEQ ID NO: 2484 - DNA, 21 bp, Artificial Sequence
  Description of Artificial Sequence: Target Sequence/siNA sense region (stab09)
  misc_feature (1)..(1): 5'-3 attached terminal deoxyabasic moiety, inverted abasic, inverted nucleotide or other terminal cap that is optionally present
  misc_feature (21)..(21): 3'-3 attached terminal deoxyabasic moiety, inverted abasic, inverted nucleotide or other terminal cap that is optionally present
  misc_feature (1)..(19): ribonucleotide unmodified or modified as described for this sequence
cugugcccgcugguggagctt

SEQ ID NO: 2485 - DNA, 21 bp, Artificial Sequence
  Description of Artificial Sequence: Target Sequence/siNA antisense region (stab10)
  misc_feature (20)..(20): Phosphorothioate or Phosphorodithioate 3'-Internucleotide Linkage (optionally present)
  misc_feature (1)..(19): ribonucleotide unmodified or modified as described for this sequence
gcuccaccagcgggcacagtt

SEQ ID NO: 2486 - DNA, 21 bp, Artificial Sequence
  Description of Artificial Sequence: Target Sequence/siNA antisense region (stab19)
  misc_feature (21)..(21): 3'-3 attached terminal deoxyabasic moiety, inverted abasic, inverted nucleotide or other terminal cap that is optionally present
  misc_feature (1)..(1): 2'-O-methyl
  misc_feature (2)..(5): 2'-deoxy-2'Fluoro
  misc_feature (6)..(6): 2'-O-methyl
  misc_feature (7)..(8): 2'-deoxy-2'Fluoro
  misc_feature (9)..(10): 2'-O-methyl
  misc_feature (11)..(11): 2'-deoxy-2'Fluoro
  misc_feature (12)..(14): 2'-O-methyl
  misc_feature (15)..(15): 2'-deoxy-2'Fluoro
  misc_feature (16)..(16): 2'-O-methyl
  misc_feature (17)..(17): 2'-deoxy-2'Fluoro
  misc_feature (18)..(19): 2'-O-methyl
  misc_feature (1)..(19): ribonucleotide unmodified or modified as described for this sequence
gcuccaccagcgggcacagtt

SEQ ID NO: 2487 - DNA, 21 bp, Artificial Sequence
  Description of Artificial Sequence: Target Sequence/siNA antisense region (stab22)
  misc_feature (21)..(21): 3'-3 attached terminal deoxyabasic moiety, inverted abasic, inverted nucleotide or other terminal cap that is optionally present
  misc_feature (20)..(20): Phosphorothioate or Phosphorodithioate 3'-Internucleotide Linkage (optionally present)
  misc_feature (1)..(19): ribonucleotide unmodified or modified as described for this sequence
gcuccaccagcgggcacagtt

SEQ ID NO: 2488 - DNA, 21 bp, Artificial Sequence
  Description of Artificial Sequence: Target Sequence/siNA antisense region (stab25)
  misc_feature (4)..(5): 2'-deoxy-2'Fluoro
  misc_feature (6)..(6): 2'-O-methyl
  misc_feature (7)..(8): 2'-deoxy-2'Fluoro
  misc_feature (9)..(10): 2'-O-methyl
  misc_feature (11)..(11): 2'-deoxy-2'Fluoro
  misc_feature (12)..(14): 2'-O-methyl
  misc_feature (15)..(15): 2'-deoxy-2'Fluoro
  misc_feature (16)..(16): 2'-O-methyl
  misc_feature (17)..(17): 2'-deoxy-2'Fluoro
  misc_feature (18)..(19): 2'-O-methyl
  misc_feature (20)..(20): Phosphorothioate or Phosphorodithioate 3'-Internucleotide Linkage (optionally present)
  misc_feature (1)..(19): ribonucleotide unmodified or modified as described for this sequence
gcuccaccagcgggcacagtt

SEQ ID NO: 2489 - RNA, 21 nt, Artificial Sequence
  Description of Artificial Sequence: Target Sequence/siNA antisense region (stab35)
  misc_feature (4)..(5): 2'-deoxy-2'Fluoro
  misc_feature (6)..(6): 2'-O-methyl
  misc_feature (7)..(8): 2'-deoxy-2'Fluoro
  misc_feature (9)..(10): 2'-O-methyl
  misc_feature (11)..(11): 2'-deoxy-2'Fluoro
  misc_feature (12)..(14): 2'-O-methyl
  misc_feature (15)..(15): 2'-deoxy-2'Fluoro
  misc_feature (16)..(16): 2'-O-methyl
  misc_feature (17)..(17): 2'-deoxy-2'Fluoro
  misc_feature (18)..(21): 2'-O-methyl
gcuccaccagcgggcacaguu

SEQ ID NO: 2490 - RNA, 21 nt, Artificial Sequence
  Description of Artificial Sequence: Target Sequence/siNA antisense region (stab36)
  misc_feature (4)..(5): 2'-deoxy-2'Fluoro
  misc_feature (6)..(6): 2'-O-methyl
  misc_feature (7)..(8): 2'-deoxy-2'Fluoro
  misc_feature (9)..(10): 2'-O-methyl
  misc_feature (11)..(11): 2'-deoxy-2'Fluoro
  misc_feature (12)..(14): 2'-O-methyl
  misc_feature (15)..(15): 2'-deoxy-2'Fluoro
  misc_feature (16)..(16): 2'-O-methyl
  misc_feature (17)..(17): 2'-deoxy-2'Fluoro
  misc_feature (18)..(21): 2'-O-methyl
gcuccaccagcgggcacagcc

SEQ ID NO: 2491 - RNA, 19 nt, Artificial Sequence
  Description of Artificial Sequence: Target Sequence/siNA sense region
caccugccccgggugcugc

SEQ ID NO: 2492 - RNA, 19 nt, Artificial Sequence
  Description of Artificial Sequence: Target Sequence/siNA antisense region
gcagcacccggggcaggug

SEQ ID NO: 2493 - DNA, 21 bp, Artificial Sequence
  Description of Artificial Sequence: Target Sequence/siNA sense region (stab00)
  misc_feature (1)..(19): ribonucleotide unmodified or modified as described for this sequence
caccugccccgggugcugctt

SEQ ID NO: 2494 - DNA, 21 bp, Artificial Sequence
  Description of Artificial Sequence: Target Sequence/siNA antisense region (stab00as)
  misc_feature (1)..(19): ribonucleotide unmodified or modified as described for this sequence
gcagcacccggggcaggugtt

SEQ ID NO: 2495 - DNA, 21 bp, Artificial Sequence
  Description of Artificial Sequence: Target Sequence/siNA sense region (stab04)
  misc_feature (1)..(1): 5'-3 attached terminal deoxyabasic moiety, inverted abasic, inverted nucleotide or other terminal cap that is optionally present
  misc_feature (21)..(21): 3'-3 attached terminal deoxyabasic moiety, inverted abasic, inverted nucleotide or other terminal cap that is optionally present
  misc_feature (1)..(1): 2'-deoxy-2'Fluoro
  misc_feature (3)..(5): 2'-deoxy-2'Fluoro
  misc_feature (7)..(10): 2'-deoxy-2'Fluoro
  misc_feature (14)..(14): 2'-deoxy-2'Fluoro
  misc_feature (16)..(17): 2'-deoxy-2'Fluoro
  misc_feature (19)..(19): 2'-deoxy-2'Fluoro
  misc_feature (1)..(19): ribonucleotide unmodified or modified as described for this sequence
caccugccccgggugcugctt

SEQ ID NO: 2496 - DNA, 21 bp, Artificial Sequence
  Description of Artificial Sequence: Target Sequence/siNA antisense region (stab05)
  misc_feature (2)..(2): 2'-deoxy-2'Fluoro
  misc_feature (5)..(5): 2'-deoxy-2'Fluoro
  misc_feature (7)..(9): 2'-deoxy-2'Fluoro
  misc_feature (14)..(14): 2'-deoxy-2'Fluoro
  misc_feature (18)..(18): 2'-deoxy-2'Fluoro
  misc_feature (20)..(20): Phosphorothioate or Phosphorodithioate 3'-Internucleotide Linkage (optionally present)
  misc_feature (1)..(19): ribonucleotide unmodified or modified as described for this sequence
gcagcacccggggcaggugtt

SEQ ID NO: 2497 - DNA, 21 bp, Artificial Sequence
  Description of Artificial Sequence: Target Sequence/siNA sense region (stab07)
  misc_feature (1)..(1): 5'-3 attached terminal deoxyabasic moiety, inverted abasic, inverted nucleotide or other terminal cap that is optionally present
  misc_feature (21)..(21): 3'-3 attached terminal deoxyabasic moiety, inverted abasic, inverted nucleotide or other terminal cap that is optionally present
  misc_feature (1)..(1): 2'-deoxy-2'Fluoro
  misc_feature (3)..(5): 2'-deoxy-2'Fluoro
  misc_feature (7)..(10): 2'-deoxy-2'Fluoro
  misc_feature (14)..(14): 2'-deoxy-2'Fluoro
  misc_feature (16)..(17): 2'-deoxy-2'Fluoro
  misc_feature (19)..(19): 2'-deoxy-2'Fluoro
  misc_feature (1)..(19): ribonucleotide unmodified or modified as described for this sequence
caccugccccgggugcugctt

SEQ ID NO: 2498 - DNA, 21 bp, Artificial Sequence
  Description of Artificial Sequence: Target Sequence/siNA antisense region (stab08)
  misc_feature (1)..(1): 2'-O-methyl
  misc_feature (2)..(2): 2'-deoxy-2'Fluoro
  misc_feature (3)..(4): 2'-O-methyl
  misc_feature (5)..(5): 2'-deoxy-2'Fluoro
  misc_feature (6)..(6): 2'-O-methyl
  misc_feature (7)..(9): 2'-deoxy-2'Fluoro
  misc_feature (10)..(13): 2'-O-methyl
  misc_feature (14)..(14): 2'-deoxy-2'Fluoro
  misc_feature (15)..(17): 2'-O-methyl
  misc_feature (18)..(18): 2'-deoxy-2'Fluoro
  misc_feature (19)..(19): 2'-O-methyl
  misc_feature (20)..(20): Phosphorothioate or Phosphorodithioate 3'-Internucleotide Linkage (optionally present)
  misc_feature (1)..(19): ribonucleotide unmodified or modified as described for this sequence
gcagcacccggggcaggugtt

SEQ ID NO: 2499 - DNA, 21 bp, Artificial Sequence
  Description of Artificial Sequence: Target Sequence/siNA sense region (stab09)
  misc_feature (1)..(1): 5'-3 attached terminal deoxyabasic moiety, inverted abasic, inverted nucleotide or other terminal cap that is optionally present
  misc_feature (21)..(21): 3'-3 attached terminal deoxyabasic moiety, inverted abasic, inverted nucleotide or other terminal cap that is optionally present
  misc_feature (1)..(19): ribonucleotide unmodified or modified as described for this sequence
caccugccccgggugcugctt

SEQ ID NO: 2500 - DNA, 21 bp, Artificial Sequence
  Description of Artificial Sequence: Target Sequence/siNA antisense region (stab10)
  misc_feature (20)..(20): Phosphorothioate or Phosphorodithioate 3'-Internucleotide Linkage (optionally present)
  misc_feature (1)..(19): ribonucleotide unmodified or modified as described for this sequence
gcagcacccggggcaggugtt

SEQ ID NO: 2501 - DNA, 21 bp, Artificial Sequence
  Description of Artificial Sequence: Target Sequence/siNA antisense region (stab19)
  misc_feature (21)..(21): 3'-3 attached terminal deoxyabasic moiety, inverted abasic, inverted nucleotide or other terminal cap that is optionally present
  misc_feature (1)..(1): 2'-O-methyl
  misc_feature (2)..(2): 2'-deoxy-2'Fluoro
  misc_feature (3)..(4): 2'-O-methyl
  misc_feature (5)..(5): 2'-deoxy-2'Fluoro
  misc_feature (6)..(6): 2'-O-methyl
  misc_feature (7)..(9): 2'-deoxy-2'Fluoro
  misc_feature (10)..(13): 2'-O-methyl
  misc_feature (14)..(14): 2'-deoxy-2'Fluoro
  misc_feature (15)..(17): 2'-O-methyl
  misc_feature (18)..(18): 2'-deoxy-2'Fluoro
  misc_feature (19)..(19): 2'-O-methyl
  misc_feature (1)..(19): ribonucleotide unmodified or modified as described for this sequence
gcagcacccggggcaggugtt

SEQ ID NO: 2502 - DNA, 21 bp, Artificial Sequence
  Description of Artificial Sequence: Target Sequence/siNA antisense region (stab22)
  misc_feature (21)..(21): 3'-3 attached terminal deoxyabasic moiety, inverted abasic, inverted nucleotide or other terminal cap that is optionally present
  misc_feature (20)..(20): Phosphorothioate or Phosphorodithioate 3'-Internucleotide Linkage (optionally present)
  misc_feature (1)..(19): ribonucleotide unmodified or modified as described for this sequence
gcagcacccggggcaggugtt

SEQ ID NO: 2503 - DNA, 21 bp, Artificial Sequence
  Description of Artificial Sequence: Target Sequence/siNA antisense region (stab25)
  misc_feature (4)..(4): 2'-O-methyl
  misc_feature (5)..(5): 2'-deoxy-2'Fluoro
  misc_feature (6)..(6): 2'-O-methyl
  misc_feature (7)..(9): 2'-deoxy-2'Fluoro
  misc_feature (10)..(13): 2'-O-methyl
  misc_feature (14)..(14): 2'-deoxy-2'Fluoro
  misc_feature (15)..(17): 2'-O-methyl
  misc_feature (18)..(18): 2'-deoxy-2'Fluoro
  misc_feature (19)..(19): 2'-O-methyl
  misc_feature (20)..(20): Phosphorothioate or Phosphorodithioate 3'-Internucleotide Linkage (optionally present)
  misc_feature (1)..(19): ribonucleotide unmodified or modified as described for this sequence
gcagcacccggggcaggugtt

SEQ ID NO: 2504 - RNA, 21 nt, Artificial Sequence
  Description of Artificial Sequence: Target Sequence/siNA antisense region (stab35)
  misc_feature (4)..(4): 2'-O-methyl
  misc_feature (5)..(5): 2'-deoxy-2'Fluoro
  misc_feature (6)..(6): 2'-O-methyl
  misc_feature (7)..(9): 2'-deoxy-2'Fluoro
  misc_feature (10)..(13): 2'-O-methyl
  misc_feature (14)..(14): 2'-deoxy-2'Fluoro
  misc_feature (15)..(17): 2'-O-methyl
  misc_feature (18)..(18): 2'-deoxy-2'Fluoro
  misc_feature (19)..(21): 2'-O-methyl
gcagcacccggggcagguguu

SEQ ID NO: 2505 - RNA, 21 nt, Artificial Sequence
  Description of Artificial Sequence: Target Sequence/siNA antisense region (stab36)
  misc_feature (4)..(4): 2'-O-methyl
  misc_feature (5)..(5): 2'-deoxy-2'Fluoro
  misc_feature (6)..(6): 2'-O-methyl
  misc_feature (7)..(9): 2'-deoxy-2'Fluoro
  misc_feature (10)..(13): 2'-O-methyl
  misc_feature (14)..(14): 2'-deoxy-2'Fluoro
  misc_feature (15)..(17): 2'-O-methyl
  misc_feature (18)..(18): 2'-deoxy-2'Fluoro
  misc_feature (19)..(21): 2'-O-methyl
gcagcacccggggcaggugcu

SEQ ID NO: 2506 - RNA, 19 nt, Artificial Sequence
  Description of Artificial Sequence: Target Sequence/siNA sense region
caggagucugagagacccc

SEQ ID NO: 2507 - RNA, 19 nt, Artificial Sequence
  Description of Artificial Sequence: Target Sequence/siNA antisense region
ggggucucucagacuccug

SEQ ID NO: 2508 - DNA, 21 bp, Artificial Sequence
  Description of Artificial Sequence: Target Sequence/siNA sense region (stab00)
  misc_feature (1)..(19): ribonucleotide unmodified or modified as described for this sequence
caggagucugagagacccctt

SEQ ID NO: 2509 - DNA, 21 bp, Artificial Sequence
  Description of Artificial Sequence: Target Sequence/siNA antisense region (stab00as)
  misc_feature (1)..(19): ribonucleotide unmodified or modified as described for this sequence
ggggucucucagacuccugtt

SEQ ID NO: 2510 - DNA, 21 bp, Artificial Sequence
  Description of Artificial Sequence: Target Sequence/siNA sense region (stab04)
  misc_feature (1)..(1): 5'-3 attached terminal deoxyabasic moiety, inverted abasic, inverted nucleotide or other terminal cap that is optionally present
  misc_feature (21)..(21): 3'-3 attached terminal deoxyabasic moiety, inverted abasic, inverted nucleotide or other terminal cap that is optionally present
  misc_feature (1)..(1): 2'-deoxy-2'Fluoro
  misc_feature (7)..(9): 2'-deoxy-2'Fluoro
  misc_feature (16)..(19): 2'-deoxy-2'Fluoro
  misc_feature (1)..(19): ribonucleotide unmodified or modified as described for this sequence
caggagucugagagacccctt

SEQ ID NO: 2511 - DNA, 21 bp, Artificial Sequence
  Description of Artificial Sequence: Target Sequence/siNA antisense region (stab05)
  misc_feature (5)..(10): 2'-deoxy-2'Fluoro
  misc_feature (14)..(18): 2'-deoxy-2'Fluoro
  misc_feature (20)..(20): Phosphorothioate or Phosphorodithioate 3'-Internucleotide Linkage (optionally present)
  misc_feature (1)..(19): ribonucleotide unmodified or modified as described for this sequence
ggggucucucagacuccugtt

SEQ ID NO: 2512 - DNA, 21 bp, Artificial Sequence
  Description of Artificial Sequence: Target Sequence/siNA sense region (stab07)
  misc_feature (1)..(1): 5'-3 attached terminal deoxyabasic moiety, inverted abasic, inverted nucleotide or other terminal cap that is optionally present
  misc_feature (21)..(21): 3'-3 attached terminal deoxyabasic moiety, inverted abasic, inverted nucleotide or other terminal cap that is optionally present
  misc_feature (1)..(1): 2'-deoxy-2'Fluoro
  misc_feature (7)..(9): 2'-deoxy-2'Fluoro
  misc_feature (16)..(19): 2'-deoxy-2'Fluoro
  misc_feature (1)..(19): ribonucleotide unmodified or modified as described for this sequence
caggagucugagagacccctt

SEQ ID NO: 2513 - DNA, 21 bp, Artificial Sequence
  Description of Artificial Sequence: Target Sequence/siNA antisense region (stab08)
  misc_feature (1)..(4): 2'-O-methyl
  misc_feature (5)..(10): 2'-deoxy-2'Fluoro
  misc_feature (11)..(13): 2'-O-methyl
  misc_feature (14)..(18): 2'-deoxy-2'Fluoro
  misc_feature (19)..(19): 2'-O-methyl
  misc_feature (20)..(20): Phosphorothioate or Phosphorodithioate 3'-Internucleotide Linkage (optionally present)
  misc_feature (1)..(19): ribonucleotide unmodified or modified as described for this sequence
ggggucucucagacuccugtt

SEQ ID NO: 2514 - DNA, 21 bp, Artificial Sequence
  Description of Artificial Sequence: Target Sequence/siNA sense region (stab09)
  misc_feature (1)..(1): 5'-3 attached terminal deoxyabasic moiety, inverted abasic, inverted nucleotide or other terminal cap that is optionally present
  misc_feature (21)..(21): 3'-3 attached terminal deoxyabasic moiety, inverted abasic, inverted nucleotide or other terminal cap that is optionally present
  misc_feature (1)..(19): ribonucleotide unmodified or modified as described for this sequence
caggagucugagagacccctt

SEQ ID NO: 2515 - DNA, 21 bp, Artificial Sequence
  Description of Artificial Sequence: Target Sequence/siNA antisense region (stab10)
  misc_feature (20)..(20): Phosphorothioate or Phosphorodithioate 3'-Internucleotide Linkage (optionally present)
  misc_feature (1)..(19): ribonucleotide unmodified or modified as described for this sequence
ggggucucucagacuccugtt

SEQ ID NO: 2516 - DNA, 21 bp, Artificial Sequence
  Description of Artificial Sequence: Target Sequence/siNA antisense region (stab19)
  misc_feature (21)..(21): 3'-3 attached terminal deoxyabasic moiety, inverted abasic, inverted nucleotide or other terminal cap that is optionally present
  misc_feature (1)..(4): 2'-O-methyl
  misc_feature (5)..(10): 2'-deoxy-2'Fluoro
  misc_feature (11)..(13): 2'-O-methyl
  misc_feature (14)..(18): 2'-deoxy-2'Fluoro
  misc_feature (19)..(19): 2'-O-methyl
  misc_feature (1)..(19): ribonucleotide unmodified or modified as described for this sequence
ggggucucucagacuccugtt

SEQ ID NO: 2517 - DNA, 21 bp, Artificial Sequence
  Description of Artificial Sequence: Target Sequence/siNA antisense region (stab22)
  misc_feature (21)..(21): 3'-3 attached terminal deoxyabasic moiety, inverted abasic, inverted nucleotide or other terminal cap that is optionally present
  misc_feature (20)..(20): Phosphorothioate or Phosphorodithioate 3'-Internucleotide Linkage (optionally present)
  misc_feature (1)..(19): ribonucleotide unmodified or modified as described for this sequence
ggggucucucagacuccugtt

SEQ ID NO: 2518 - DNA, 21 bp, Artificial Sequence
  Description of Artificial Sequence: Target Sequence/siNA antisense region (stab25)
  misc_feature (4)..(4): 2'-O-methyl
  misc_feature (5)..(10): 2'-deoxy-2'Fluoro
  misc_feature (11)..(13): 2'-O-methyl
  misc_feature (14)..(18): 2'-deoxy-2'Fluoro
  misc_feature (19)..(19): 2'-O-methyl
  misc_feature (20)..(20): Phosphorothioate or Phosphorodithioate 3'-Internucleotide Linkage (optionally present)
  misc_feature (1)..(19): ribonucleotide unmodified or modified as described for this sequence
ggggucucucagacuccugtt

SEQ ID NO: 2519 - RNA, 21 nt, Artificial Sequence
  Description of Artificial Sequence: Target Sequence/siNA antisense region (stab35)
  misc_feature (4)..(4): 2'-O-methyl
  misc_feature (5)..(10): 2'-deoxy-2'Fluoro
  misc_feature (11)..(13): 2'-O-methyl
  misc_feature (14)..(18): 2'-deoxy-2'Fluoro
  misc_feature (19)..(21): 2'-O-methyl
ggggucucucagacuccuguu

SEQ ID NO: 2520 - RNA, 21 nt, Artificial Sequence
  Description of Artificial Sequence: Target Sequence/siNA antisense region (stab36)
  misc_feature (4)..(4): 2'-O-methyl
  misc_feature (5)..(10): 2'-deoxy-2'Fluoro
  misc_feature (11)..(13): 2'-O-methyl
  misc_feature (14)..(18): 2'-deoxy-2'Fluoro
  misc_feature (19)..(21): 2'-O-methyl
ggggucucucagacuccugca

SEQ ID NO: 2521 - RNA, 19 nt, Artificial Sequence
  Description of Artificial Sequence: Target Sequence/siNA sense region
cugcccagggcagcucugc

SEQ ID NO: 2522 - RNA, 19 nt, Artificial Sequence
  Description of Artificial Sequence: Target Sequence/siNA antisense region
gcagagcugcccugggcag

SEQ ID NO: 2523 - DNA, 21 bp, Artificial Sequence
  Description of Artificial Sequence: Target Sequence/siNA sense region (stab00)
  misc_feature (1)..(19): ribonucleotide unmodified or modified as described for this sequence
cugcccagggcagcucugctt

SEQ ID NO: 2524 - DNA, 21 bp, Artificial Sequence
  Description of Artificial Sequence: Target Sequence/siNA antisense region (stab00as)
  misc_feature (1)..(19): ribonucleotide unmodified or modified as described for this sequence
gcagagcugcccugggcagtt

SEQ ID NO: 2525 - DNA, 21 bp, Artificial Sequence
  Description of Artificial Sequence: Target Sequence/siNA sense region (stab04)
  misc_feature (1)..(1): 5'-3 attached terminal deoxyabasic moiety, inverted abasic, inverted nucleotide or other terminal cap that is optionally present
  misc_feature (21)..(21): 3'-3 attached terminal deoxyabasic moiety, inverted abasic, inverted nucleotide or other terminal cap that is optionally present
  misc_feature (1)..(2): 2'-deoxy-2'Fluoro
  misc_feature (4)..(6): 2'-deoxy-2'Fluoro
  misc_feature (11)..(11): 2'-deoxy-2'Fluoro
  misc_feature (14)..(17): 2'-deoxy-2'Fluoro
  misc_feature (19)..(19): 2'-deoxy-2'Fluoro
  misc_feature (1)..(19): ribonucleotide unmodified or modified as described for this sequence
cugcccagggcagcucugctt

SEQ ID NO: 2526 - DNA, 21 bp, Artificial Sequence
  Description of Artificial Sequence: Target Sequence/siNA antisense region (stab05)
  misc_feature (2)..(2): 2'-deoxy-2'Fluoro
  misc_feature (7)..(8): 2'-deoxy-2'Fluoro
  misc_feature (10)..(13): 2'-deoxy-2'Fluoro
  misc_feature (17)..(17): 2'-deoxy-2'Fluoro
  misc_feature (20)..(20): Phosphorothioate or Phosphorodithioate 3'-Internucleotide Linkage (optionally present)
  misc_feature (1)..(19): ribonucleotide unmodified or modified as described for this sequence
gcagagcugcccugggcagtt

SEQ ID NO: 2527 - DNA, 21 bp, Artificial Sequence
  Description of Artificial Sequence: Target Sequence/siNA sense region (stab07)
  misc_feature (1)..(1): 5'-3 attached terminal deoxyabasic moiety, inverted abasic, inverted nucleotide or other terminal cap that is optionally present
  misc_feature (21)..(21): 3'-3 attached terminal deoxyabasic moiety, inverted abasic, inverted nucleotide or other terminal cap that is optionally present
  misc_feature (1)..(2): 2'-deoxy-2'Fluoro
  misc_feature (4)..(6): 2'-deoxy-2'Fluoro
  misc_feature (11)..(11): 2'-deoxy-2'Fluoro
  misc_feature (14)..(17): 2'-deoxy-2'Fluoro
  misc_feature (19)..(19): 2'-deoxy-2'Fluoro
  misc_feature (1)..(19): ribonucleotide unmodified or modified as described for this sequence
cugcccagggcagcucugctt

SEQ ID NO: 2528 - DNA, 21 bp, Artificial Sequence
  Description of Artificial Sequence: Target Sequence/siNA antisense region (stab08)
  misc_feature (1)..(1): 2'-O-methyl
  misc_feature (2)..(2): 2'-deoxy-2'Fluoro
  misc_feature (3)..(6): 2'-O-methyl
  misc_feature (7)..(8): 2'-deoxy-2'Fluoro
  misc_feature (9)..(9): 2'-O-methyl
  misc_feature (10)..(13): 2'-deoxy-2'Fluoro
  misc_feature (14)..(16): 2'-O-methyl
  misc_feature (17)..(17): 2'-deoxy-2'Fluoro
  misc_feature (18)..(19): 2'-O-methyl
  misc_feature (20)..(20): Phosphorothioate or Phosphorodithioate 3'-Internucleotide Linkage (optionally present)
  misc_feature (1)..(19): ribonucleotide unmodified or modified as described for this sequence
gcagagcugcccugggcagtt

SEQ ID NO: 2529 - DNA, 21 bp, Artificial Sequence
  Description of Artificial Sequence: Target Sequence/siNA sense region (stab09)
  misc_feature (1)..(1): 5'-3 attached terminal deoxyabasic moiety, inverted abasic, inverted nucleotide or other terminal cap that is optionally present
  misc_feature (21)..(21): 3'-3 attached terminal deoxyabasic moiety, inverted abasic, inverted nucleotide or other terminal cap that is optionally present
  misc_feature (1)..(19): ribonucleotide unmodified or modified as described for this sequence
cugcccagggcagcucugctt

SEQ ID NO: 2530 - DNA, 21 bp, Artificial Sequence
  Description of Artificial Sequence: Target Sequence/siNA antisense region (stab10)
  misc_feature (20)..(20): Phosphorothioate or Phosphorodithioate 3'-Internucleotide Linkage (optionally present)
  misc_feature (1)..(19): ribonucleotide unmodified or modified as described for this sequence
gcagagcugcccugggcagtt

SEQ ID NO: 2531 - DNA, 21 bp, Artificial Sequence
  Description of Artificial Sequence: Target Sequence/siNA antisense region (stab19)
  misc_feature (21)..(21): 3'-3 attached terminal deoxyabasic moiety, inverted abasic, inverted nucleotide or other terminal cap that is optionally present
  misc_feature (1)..(1): 2'-O-methyl
  misc_feature (2)..(2): 2'-deoxy-2'Fluoro
  misc_feature (3)..(6): 2'-O-methyl
  misc_feature (7)..(8): 2'-deoxy-2'Fluoro
  misc_feature (9)..(9): 2'-O-methyl
  misc_feature (10)..(13): 2'-deoxy-2'Fluoro
  misc_feature (14)..(16): 2'-O-methyl
  misc_feature (17)..(17): 2'-deoxy-2'Fluoro
  misc_feature (18)..(19): 2'-O-methyl
  misc_feature (1)..(19): ribonucleotide unmodified or modified as described for this sequence
gcagagcugcccugggcagtt

SEQ ID NO: 2532 - DNA, 21 bp, Artificial Sequence
  Description of Artificial Sequence: Target Sequence/siNA antisense region (stab22)
  misc_feature (21)..(21): 3'-3 attached terminal deoxyabasic moiety, inverted abasic, inverted nucleotide or other terminal cap that is optionally present
  misc_feature (20)..(20): Phosphorothioate or Phosphorodithioate 3'-Internucleotide Linkage (optionally present)
  misc_feature (1)..(19): ribonucleotide unmodified or modified as described for this sequence
gcagagcugcccugggcagtt

SEQ ID NO: 2533 - DNA, 21 bp, Artificial Sequence
  Description of Artificial Sequence: Target Sequence/siNA antisense region (stab25)
  misc_feature (4)..(6): 2'-O-methyl
  misc_feature (7)..(8): 2'-deoxy-2'Fluoro
  misc_feature (9)..(9): 2'-O-methyl
  misc_feature (10)..(13): 2'-deoxy-2'Fluoro
  misc_feature (14)..(16): 2'-O-methyl
  misc_feature (17)..(17): 2'-deoxy-2'Fluoro
  misc_feature (18)..(19): 2'-O-methyl
  misc_feature (20)..(20): Phosphorothioate or Phosphorodithioate 3'-Internucleotide Linkage (optionally present)
  misc_feature (1)..(19): ribonucleotide unmodified or modified as described for this sequence
gcagagcugcccugggcagtt

SEQ ID NO: 2534 - RNA, 21 nt, Artificial Sequence
  Description of Artificial Sequence: Target Sequence/siNA antisense region (stab35)
  misc_feature (4)..(6): 2'-O-methyl
  misc_feature (7)..(8): 2'-deoxy-2'Fluoro
  misc_feature (9)..(9): 2'-O-methyl
  misc_feature (10)..(13): 2'-deoxy-2'Fluoro
  misc_feature (14)..(16): 2'-O-methyl
  misc_feature (17)..(17): 2'-deoxy-2'Fluoro
  misc_feature (18)..(21): 2'-O-methyl
gcagagcugcccugggcaguu

SEQ ID NO: 2535 - RNA, 21 nt, Artificial Sequence
  Description of Artificial Sequence: Target Sequence/siNA antisense region (stab36)
  misc_feature (4)..(6): 2'-O-methyl
  misc_feature (7)..(8): 2'-deoxy-2'Fluoro
  misc_feature (9)..(9): 2'-O-methyl
  misc_feature (10)..(13): 2'-deoxy-2'Fluoro
  misc_feature (14)..(16): 2'-O-methyl
  misc_feature (17)..(17): 2'-deoxy-2'Fluoro
  misc_feature (18)..(21): 2'-O-methyl
gcagagcugcccugggcaggg

SEQ ID NO: 2536 - RNA, 19 nt, Artificial Sequence
  Description of Artificial Sequence: Target Sequence/siNA sense region
cacuccuucaaggcugccc

SEQ ID NO: 2537 - RNA, 19 nt, Artificial Sequence
  Description of Artificial Sequence: Target Sequence/siNA antisense region
gggcagccuugaaggagug

SEQ ID NO: 2538 - DNA, 21 bp, Artificial Sequence
  Description of Artificial Sequence: Target Sequence/siNA sense region (stab00)
  misc_feature (1)..(19): ribonucleotide unmodified or modified as described for this sequence
cacuccuucaaggcugccctt

SEQ ID NO: 2539 - DNA, 21 bp, Artificial Sequence
  Description of Artificial Sequence: Target Sequence/siNA antisense region (stab00as)
  misc_feature (1)..(19): ribonucleotide unmodified or modified as described for this sequence
gggcagccuugaaggagugtt

SEQ ID NO: 2540 - DNA, 21 bp, Artificial Sequence
  Description of Artificial Sequence: Target Sequence/siNA sense region (stab04)
  misc_feature (1)..(1): 5'-3 attached terminal deoxyabasic moiety, inverted abasic, inverted nucleotide or other terminal cap that is optionally present
  misc_feature (21)..(21): 3'-3 attached terminal deoxyabasic moiety, inverted abasic, inverted nucleotide or other terminal cap that is optionally present
  misc_feature (1)..(1): 2'-deoxy-2'Fluoro
  misc_feature (3)..(9): 2'-deoxy-2'Fluoro
  misc_feature (14)..(15): 2'-deoxy-2'Fluoro
  misc_feature (17)..(19): 2'-deoxy-2'Fluoro
  misc_feature (1)..(19): ribonucleotide unmodified or modified as described for this sequence
cacuccuucaaggcugccctt

SEQ ID NO: 2541 - DNA, 21 bp, Artificial Sequence
  Description of Artificial Sequence: Target Sequence/siNA antisense region (stab05)
  misc_feature (4)..(4): 2'-deoxy-2'Fluoro
  misc_feature (7)..(10): 2'-deoxy-2'Fluoro
  misc_feature (18)..(18): 2'-deoxy-2'Fluoro
  misc_feature (20)..(20): Phosphorothioate or Phosphorodithioate 3'-Internucleotide Linkage (optionally present)
  misc_feature (1)..(19): ribonucleotide unmodified or modified as described for this sequence
gggcagccuugaaggagugtt

SEQ ID NO: 2542 - DNA, 21 bp, Artificial Sequence
  Description of Artificial Sequence: Target Sequence/siNA sense region (stab07)
  misc_feature (1)..(1): 5'-3 attached terminal deoxyabasic moiety, inverted abasic, inverted nucleotide or other terminal cap that is optionally present
  misc_feature (21)..(21): 3'-3 attached terminal deoxyabasic moiety, inverted abasic, inverted nucleotide or other terminal cap that is optionally present
  misc_feature (1)..(1): 2'-deoxy-2'Fluoro
  misc_feature (3)..(9): 2'-deoxy-2'Fluoro
  misc_feature (14)..(15): 2'-deoxy-2'Fluoro
  misc_feature (17)..(19): 2'-deoxy-2'Fluoro
  misc_feature (1)..(19): ribonucleotide unmodified or modified as described for this sequence
cacuccuucaaggcugccctt

SEQ ID NO: 2543 - DNA, 21 bp, Artificial Sequence
  Description of Artificial Sequence: Target Sequence/siNA antisense region (stab08)
  misc_feature (1)..(3): 2'-O-methyl
  misc_feature (4)..(4): 2'-deoxy-2'Fluoro
  misc_feature (5)..(6): 2'-O-methyl
  misc_feature (7)..(10): 2'-deoxy-2'Fluoro
  misc_feature (11)..(17): 2'-O-methyl
  misc_feature (18)..(18): 2'-deoxy-2'Fluoro
  misc_feature (19)..(19): 2'-O-methyl
  misc_feature (20)..(20): Phosphorothioate or Phosphorodithioate 3'-Internucleotide Linkage (optionally present)
  misc_feature (1)..(19): ribonucleotide unmodified or modified as described for this sequence
gggcagccuugaaggagugtt

SEQ ID NO: 2544 - DNA, 21 bp, Artificial Sequence
  Description of Artificial Sequence: Target Sequence/siNA sense region (stab09)
  misc_feature (1)..(1): 5'-3 attached terminal deoxyabasic moiety, inverted abasic, inverted nucleotide or other terminal cap that is optionally present
  misc_feature (21)..(21): 3'-3 attached terminal deoxyabasic moiety, inverted abasic, inverted nucleotide or other terminal cap that is optionally present
  misc_feature (1)..(19): ribonucleotide unmodified or modified as described for this sequence
cacuccuucaaggcugccctt

SEQ ID NO: 2545 - DNA, 21 bp, Artificial Sequence
  Description of Artificial Sequence: Target Sequence/siNA antisense region (stab10)
  misc_feature (20)..(20): Phosphorothioate or Phosphorodithioate 3'-Internucleotide Linkage (optionally present)
  misc_feature (1)..(19): ribonucleotide unmodified or modified as described for this sequence
gggcagccuugaaggagugtt

SEQ ID NO: 2546 - DNA, 21 bp, Artificial Sequence
  Description of Artificial Sequence: Target Sequence/siNA antisense region (stab19)
  misc_feature (21)..(21): 3'-3 attached terminal deoxyabasic moiety, inverted abasic, inverted nucleotide or other terminal cap that is optionally present
  misc_feature (1)..(3): 2'-O-methyl
  misc_feature (4)..(4): 2'-deoxy-2'Fluoro
  misc_feature (5)..(6): 2'-O-methyl
  misc_feature (7)..(10): 2'-deoxy-2'Fluoro
  misc_feature (11)..(17): 2'-O-methyl
  misc_feature (18)..(18): 2'-deoxy-2'Fluoro
  misc_feature (19)..(19): 2'-O-methyl
  misc_feature (1)..(19): ribonucleotide unmodified or modified as described for this sequence
gggcagccuugaaggagugtt

SEQ ID NO: 2547 - DNA, 21 bp, Artificial Sequence
  Description of Artificial Sequence: Target Sequence/siNA antisense region (stab22)
  misc_feature (21)..(21): 3'-3 attached terminal deoxyabasic moiety, inverted abasic, inverted nucleotide or other terminal cap that is optionally present
  misc_feature (20)..(20): Phosphorothioate or Phosphorodithioate 3'-Internucleotide Linkage (optionally present)
  misc_feature (1)..(19): ribonucleotide unmodified or modified as described for this sequence
gggcagccuugaaggagugtt

SEQ ID NO: 2548 - DNA, 21 bp, Artificial Sequence
  Description of Artificial Sequence: Target Sequence/siNA antisense region (stab25)
  misc_feature (4)..(4): 2'-deoxy-2'Fluoro
  misc_feature (5)..(6): 2'-O-methyl
  misc_feature (7)..(10): 2'-deoxy-2'Fluoro
  misc_feature (11)..(17): 2'-O-methyl
  misc_feature (18)..(18): 2'-deoxy-2'Fluoro
  misc_feature (19)..(19): 2'-O-methyl
  misc_feature (20)..(20): Phosphorothioate or Phosphorodithioate 3'-Internucleotide Linkage (optionally present)
  misc_feature (1)..(19): ribonucleotide unmodified or modified as described for this sequence
gggcagccuugaaggagugtt

SEQ ID NO: 2549 - RNA, 21 nt, Artificial Sequence
  Description of Artificial Sequence: Target Sequence/siNA antisense region (stab35)
  misc_feature (4)..(4): 2'-deoxy-2'Fluoro
  misc_feature (5)..(6): 2'-O-methyl
  misc_feature (7)..(10): 2'-deoxy-2'Fluoro
  misc_feature (11)..(17): 2'-O-methyl
  misc_feature (18)..(18): 2'-deoxy-2'Fluoro
  misc_feature (19)..(21): 2'-O-methyl
gggcagccuugaaggaguguu

SEQ ID NO: 2550 - RNA, 21 nt, Artificial Sequence
  Description of Artificial Sequence: Target Sequence/siNA antisense region (stab36)
  misc_feature (4)..(4): 2'-deoxy-2'Fluoro
  misc_feature (5)..(6): 2'-O-methyl
  misc_feature (7)..(10): 2'-deoxy-2'Fluoro
  misc_feature (11)..(17): 2'-O-methyl
  misc_feature (18)..(18): 2'-deoxy-2'Fluoro
  misc_feature (19)..(21): 2'-O-methyl
gggcagccuugaaggagugca

SEQ ID NO: 2551 - RNA, 19 nt, Artificial Sequence
  Description of Artificial Sequence: Target Sequence/siNA sense region
cgggcccugcugggcugug

SEQ ID NO: 2552 - RNA, 19 nt, Artificial Sequence
  Description of Artificial Sequence: Target Sequence/siNA antisense region
cacagcccagcagggcccg

SEQ ID NO: 2553 - DNA, 21 bp, Artificial Sequence
  Description of Artificial Sequence: Target Sequence/siNA sense region (stab00)
  misc_feature (1)..(19): ribonucleotide unmodified or modified as described for this sequence
cgggcccugcugggcugugtt

SEQ ID NO: 2554 - DNA, 21 bp, Artificial Sequence
  Description of Artificial Sequence: Target Sequence/siNA antisense region (stab00as)
  misc_feature (1)..(19): ribonucleotide unmodified or modified as described for this sequence
cacagcccagcagggcccgtt

SEQ ID NO: 2555 - DNA, 21 bp, Artificial Sequence
  Description of Artificial Sequence: Target Sequence/siNA sense region (stab04)
  misc_feature (1)..(1): 5'-3 attached terminal deoxyabasic moiety, inverted abasic, inverted nucleotide or other terminal cap that is optionally present
  misc_feature (21)..(21): 3'-3 attached terminal deoxyabasic moiety, inverted abasic, inverted nucleotide or other terminal cap that is optionally present
  misc_feature (1)..(1): 2'-deoxy-2'Fluoro
  misc_feature (5)..(8): 2'-deoxy-2'Fluoro
  misc_feature (10)..(11): 2'-deoxy-2'Fluoro
  misc_feature (15)..(16): 2'-deoxy-2'Fluoro
  misc_feature (18)..(18): 2'-deoxy-2'Fluoro
  misc_feature (1)..(19): ribonucleotide unmodified or modified as described for this sequence
cgggcccugcugggcugugtt

SEQ ID NO: 2556 - DNA, 21 bp, Artificial Sequence
  Description of Artificial Sequence: Target Sequence/siNA antisense region (stab05)
  misc_feature (1)..(1): 2'-deoxy-2'Fluoro
  misc_feature (3)..(3): 2'-deoxy-2'Fluoro
  misc_feature (6)..(8): 2'-deoxy-2'Fluoro
  misc_feature (11)..(11): 2'-deoxy-2'Fluoro
  misc_feature (16)..(18): 2'-deoxy-2'Fluoro
  misc_feature (20)..(20): Phosphorothioate or Phosphorodithioate 3'-Internucleotide Linkage (optionally present)
  misc_feature (1)..(19): ribonucleotide unmodified or modified as described for this sequence
cacagcccagcagggcccgtt

SEQ ID NO: 2557 - DNA, 21 bp, Artificial Sequence
  Description of Artificial Sequence: Target Sequence/siNA sense region (stab07)
  misc_feature (1)..(1): 5'-3 attached terminal deoxyabasic moiety, inverted abasic, inverted nucleotide or other terminal cap that is optionally present
  misc_feature (21)..(21): 3'-3 attached terminal deoxyabasic moiety, inverted abasic, inverted nucleotide or other terminal cap that is optionally present
  misc_feature (1)..(1): 2'-deoxy-2'Fluoro
  misc_feature (5)..(8): 2'-deoxy-2'Fluoro
  misc_feature (10)..(11): 2'-deoxy-2'Fluoro
  misc_feature (15)..(16): 2'-deoxy-2'Fluoro
  misc_feature (18)..(18): 2'-deoxy-2'Fluoro
  misc_feature (1)..(19): ribonucleotide unmodified or modified as described for this sequence
cgggcccugcugggcugugtt

SEQ ID NO: 2558 - DNA, 21 bp, Artificial Sequence
  Description of Artificial Sequence: Target Sequence/siNA antisense region (stab08)
  misc_feature (1)..(1): 2'-deoxy-2'Fluoro
  misc_feature (2)..(2): 2'-O-methyl
  misc_feature (3)..(3): 2'-deoxy-2'Fluoro
  misc_feature (4)..(5): 2'-O-methyl
  misc_feature (6)..(8): 2'-deoxy-2'Fluoro
  misc_feature (9)..(10): 2'-O-methyl
  misc_feature (11)..(11): 2'-deoxy-2'Fluoro
  misc_feature (12)..(15): 2'-O-methyl
  misc_feature (16)..(18): 2'-deoxy-2'Fluoro
  misc_feature (19)..(19): 2'-O-methyl
  misc_feature (20)..(20): Phosphorothioate or Phosphorodithioate 3'-Internucleotide Linkage (optionally present)
  misc_feature (1)..(19): ribonucleotide unmodified or modified as described for this sequence
cacagcccagcagggcccgtt

SEQ ID NO: 2559 - DNA, 21 bp, Artificial Sequence
  Description of Artificial Sequence: Target Sequence/siNA sense region (stab09)
  misc_feature (1)..(1): 5'-3 attached terminal deoxyabasic moiety, inverted abasic, inverted nucleotide or other terminal cap that is optionally present
  misc_feature (21)..(21): 3'-3 attached terminal deoxyabasic moiety, inverted abasic, inverted nucleotide or other terminal cap that is optionally present
  misc_feature (1)..(19): ribonucleotide unmodified or modified as described for this sequence
cgggcccugcugggcugugtt

SEQ ID NO: 2560 - DNA, 21 bp, Artificial Sequence
  Description of Artificial Sequence: Target Sequence/siNA antisense region (stab10)
  misc_feature (20)..(20): Phosphorothioate or Phosphorodithioate 3'-Internucleotide Linkage (optionally present)
  misc_feature (1)..(19): ribonucleotide unmodified or modified as described for this sequence
cacagcccagcagggcccgtt

SEQ ID NO: 2561 - DNA, 21 bp, Artificial Sequence
  Description of Artificial Sequence: Target Sequence/siNA antisense region (stab19)
  misc_feature (21)..(21): 3'-3 attached terminal deoxyabasic moiety, inverted abasic, inverted nucleotide or other terminal cap that is optionally present
  misc_feature (1)..(1): 2'-deoxy-2'Fluoro
  misc_feature (2)..(2): 2'-O-methyl
  misc_feature (3)..(3): 2'-deoxy-2'Fluoro
  misc_feature (4)..(5): 2'-O-methyl
  misc_feature (6)..(8): 2'-deoxy-2'Fluoro
  misc_feature (9)..(10): 2'-O-methyl
  misc_feature (11)..(11): 2'-deoxy-2'Fluoro
  misc_feature (12)..(15): 2'-O-methyl
  misc_feature (16)..(18): 2'-deoxy-2'Fluoro
  misc_feature (19)..(19): 2'-O-methyl
  misc_feature (1)..(19): ribonucleotide unmodified or modified as described for this sequence
cacagcccagcagggcccgtt

SEQ ID NO: 2562 - DNA, 21 bp, Artificial Sequence
  Description of Artificial Sequence: Target Sequence/siNA antisense region (stab22)
  misc_feature (21)..(21): 3'-3 attached terminal deoxyabasic moiety, inverted abasic, inverted nucleotide or other terminal cap that is optionally present
  misc_feature (20)..(20): Phosphorothioate or Phosphorodithioate 3'-Internucleotide Linkage (optionally present)
  misc_feature (1)..(19): ribonucleotide unmodified or modified as described for this sequence
cacagcccagcagggcccgtt

SEQ ID NO: 2563 - DNA, 21 bp, Artificial Sequence
  Description of Artificial Sequence: Target Sequence/siNA antisense region (stab25)
  misc_feature (4)..(5): 2'-O-methyl
  misc_feature (6)..(8): 2'-deoxy-2'Fluoro
  misc_feature (9)..(10): 2'-O-methyl
  misc_feature (11)..(11): 2'-deoxy-2'Fluoro
  misc_feature (12)..(15): 2'-O-methyl
  misc_feature (16)..(18): 2'-deoxy-2'Fluoro
  misc_feature (19)..(19): 2'-O-methyl
  misc_feature (20)..(20): Phosphorothioate or Phosphorodithioate 3'-Internucleotide Linkage (optionally present)
  misc_feature (1)..(19): ribonucleotide unmodified or modified as described for this sequence
cacagcccagcagggcccgtt

SEQ ID NO: 2564 - RNA, 21 nt, Artificial Sequence
  Description of Artificial Sequence: Target Sequence/siNA antisense region (stab35)
  misc_feature (4)..(5): 2'-O-methyl
  misc_feature (6)..(8): 2'-deoxy-2'Fluoro
  misc_feature (9)..(10): 2'-O-methyl
  misc_feature (11)..(11): 2'-deoxy-2'Fluoro
  misc_feature (12)..(15): 2'-O-methyl
  misc_feature (16)..(18): 2'-deoxy-2'Fluoro
  misc_feature (19)..(21): 2'-O-methyl
cacagcccagcagggcccguu

SEQ ID NO: 2565 - RNA, 21 nt, Artificial Sequence
  Description of Artificial Sequence: Target Sequence/siNA antisense region (stab36)
  misc_feature (4)..(5): 2'-O-methyl
  misc_feature (6)..(8): 2'-deoxy-2'Fluoro
  misc_feature (9)..(10): 2'-O-methyl
  misc_feature (11)..(11): 2'-deoxy-2'Fluoro
  misc_feature (12)..(15): 2'-O-methyl
  misc_feature (16)..(18): 2'-deoxy-2'Fluoro
  misc_feature (19)..(21): 2'-O-methyl
cacagcccagcagggcccggg

SEQ ID NO: 2566 - RNA, 19 nt, Artificial Sequence
  Description of Artificial Sequence: Target Sequence/siNA sense region
gccaaggcagagucugguc

SEQ ID NO: 2567 - RNA, 19 nt, Artificial Sequence
  Description of Artificial Sequence: Target Sequence/siNA antisense region
gaccagacucugccuuggc

SEQ ID NO: 2568 - DNA, 21 bp, Artificial Sequence
  Description of Artificial Sequence: Target Sequence/siNA sense region (stab00)
  misc_feature (1)..(19): ribonucleotide unmodified or modified as described for this sequence
gccaaggcagagucugguctt

SEQ ID NO: 2569 - DNA, 21 bp, Artificial Sequence
  Description of Artificial Sequence: Target Sequence/siNA antisense region (stab00as)
  misc_feature (1)..(19): ribonucleotide unmodified or modified as described for this sequence
gaccagacucugccuuggctt

SEQ ID NO: 2570 - DNA, 21 bp, Artificial Sequence
  Description of Artificial Sequence: Target Sequence/siNA sense region (stab04)
  misc_feature (1)..(1): 5'-3 attached terminal deoxyabasic moiety, inverted abasic, inverted nucleotide or other terminal cap that is optionally present
  misc_feature (21)..(21): 3'-3 attached terminal deoxyabasic moiety, inverted abasic, inverted nucleotide or other terminal cap that is optionally present
  misc_feature (2)..(3): 2'-deoxy-2'Fluoro
  misc_feature (8)..(8): 2'-deoxy-2'Fluoro
  misc_feature (13)..(15): 2'-deoxy-2'Fluoro
  misc_feature (18)..(19): 2'-deoxy-2'Fluoro
  misc_feature (1)..(19): ribonucleotide unmodified or modified as described for this sequence
gccaaggcagagucugguctt

SEQ ID NO: 2571 - DNA, 21 bp, Artificial Sequence
  Description of Artificial Sequence: Target Sequence/siNA antisense region (stab05)
  misc_feature (3)..(4): 2'-deoxy-2'Fluoro
  misc_feature (8)..(11): 2'-deoxy-2'Fluoro
  misc_feature (13)..(16): 2'-deoxy-2'Fluoro
  misc_feature (19)..(19): 2'-deoxy-2'Fluoro
  misc_feature (20)..(20): Phosphorothioate or Phosphorodithioate 3'-Internucleotide Linkage (optionally present)
  misc_feature (1)..(19): ribonucleotide unmodified or modified as described for this sequence
gaccagacucugccuuggctt

SEQ ID NO: 2572 - DNA, 21 bp, Artificial Sequence
  Description of Artificial Sequence: Target Sequence/siNA sense region (stab07)
  misc_feature (1)..(1): 5'-3 attached terminal deoxyabasic moiety, inverted abasic, inverted nucleotide or other terminal cap that is optionally present
  misc_feature (21)..(21): 3'-3 attached terminal deoxyabasic moiety, inverted abasic, inverted nucleotide or other terminal cap that is optionally present
  misc_feature (2)..(3): 2'-deoxy-2'Fluoro
  misc_feature (8)..(8): 2'-deoxy-2'Fluoro
  misc_feature (13)..(15): 2'-deoxy-2'Fluoro
  misc_feature (18)..(19): 2'-deoxy-2'Fluoro
  misc_feature (1)..(19): ribonucleotide unmodified or modified as described for this sequence
gccaaggcagagucugguctt

SEQ ID NO: 2573 - DNA, 21 bp, Artificial Sequence
  Description of Artificial Sequence: Target Sequence/siNA antisense region (stab08)
  misc_feature (1)..(2): 2'-O-methyl
  misc_feature (3)..(4): 2'-deoxy-2'Fluoro
  misc_feature (5)..(7): 2'-O-methyl
  misc_feature (8)..(11): 2'-deoxy-2'Fluoro
  misc_feature (12)..(12): 2'-O-methyl
  misc_feature (13)..(16): 2'-deoxy-2'Fluoro
  misc_feature (17)..(18): 2'-O-methyl
  misc_feature (19)..(19): 2'-deoxy-2'Fluoro
  misc_feature (20)..(20): Phosphorothioate or Phosphorodithioate 3'-Internucleotide Linkage (optionally present)
  misc_feature (1)..(19): ribonucleotide unmodified or modified as described for this sequence
gaccagacucugccuuggctt

SEQ ID NO: 2574 - DNA, 21 bp, Artificial Sequence
  Description of Artificial Sequence: Target Sequence/siNA sense region (stab09)
  misc_feature (1)..(1): 5'-3 attached terminal deoxyabasic moiety, inverted abasic, inverted nucleotide or other terminal cap that is optionally present
  misc_feature (21)..(21): 3'-3 attached terminal deoxyabasic moiety, inverted abasic, inverted nucleotide or other terminal cap that is optionally present
  misc_feature (1)..(19): ribonucleotide unmodified or modified as described for this sequence
gccaaggcagagucugguctt

SEQ ID NO: 2575 - DNA, 21 bp, Artificial Sequence
  Description of Artificial Sequence: Target Sequence/siNA antisense region (stab10)
  misc_feature (20)..(20): Phosphorothioate or Phosphorodithioate 3'-Internucleotide Linkage (optionally present)
  misc_feature (1)..(19): ribonucleotide unmodified or modified as described for this sequence
gaccagacucugccuuggctt

SEQ ID NO: 2576 - DNA, 21 bp, Artificial Sequence
  Description of Artificial Sequence: Target Sequence/siNA antisense region (stab19)
  misc_feature (21)..(21): 3'-3 attached terminal deoxyabasic moiety, inverted abasic, inverted nucleotide or other terminal cap that is optionally present
  misc_feature (1)..(2): 2'-O-methyl
  misc_feature (3)..(4): 2'-deoxy-2'Fluoro
  misc_feature (5)..(7): 2'-O-methyl
  misc_feature (8)..(11): 2'-deoxy-2'Fluoro
  misc_feature (12)..(12): 2'-O-methyl
  misc_feature (13)..(16): 2'-deoxy-2'Fluoro
  misc_feature (17)..(18): 2'-O-methyl
  misc_feature (19)..(19): 2'-deoxy-2'Fluoro
  misc_feature (1)..(19): ribonucleotide unmodified or modified as described for this sequence
gaccagacucugccuuggctt

SEQ ID NO: 2577 - DNA, 21 bp, Artificial Sequence
  Description of Artificial Sequence: Target Sequence/siNA antisense region (stab22)
  misc_feature (21)..(21): 3'-3 attached terminal deoxyabasic moiety, inverted abasic, inverted nucleotide or other terminal cap that is optionally present
  misc_feature (20)..(20): Phosphorothioate or Phosphorodithioate 3'-Internucleotide Linkage (optionally present)
  misc_feature (1)..(19): ribonucleotide unmodified or modified as described for this sequence
gaccagacucugccuuggctt

SEQ ID NO: 2578 - DNA, 21 bp, Artificial Sequence
  Description of Artificial Sequence: Target Sequence/siNA antisense region (stab25)
  misc_feature (4)..(4): 2'-deoxy-2'Fluoro
  misc_feature (5)..(7): 2'-O-methyl
  misc_feature (8)..(11): 2'-deoxy-2'Fluoro
  misc_feature (12)..(12): 2'-O-methyl
  misc_feature (13)..(16): 2'-deoxy-2'Fluoro
  misc_feature (17)..(18): 2'-O-methyl
  misc_feature (19)..(19): 2'-deoxy-2'Fluoro
  misc_feature (20)..(20): Phosphorothioate or Phosphorodithioate 3'-Internucleotide Linkage (optionally present)
  misc_feature (1)..(19): ribonucleotide unmodified or modified as described for this sequence
gaccagacucugccuuggctt

SEQ ID NO: 2579 - RNA, 21 nt, Artificial Sequence
  Description of Artificial Sequence: Target Sequence/siNA antisense region (stab35)
  misc_feature (4)..(4): 2'-deoxy-2'Fluoro
  misc_feature (5)..(7): 2'-O-methyl
  misc_feature (8)..(11): 2'-deoxy-2'Fluoro
  misc_feature (12)..(12): 2'-O-methyl
  misc_feature (13)..(16): 2'-deoxy-2'Fluoro
  misc_feature (17)..(18): 2'-O-methyl
  misc_feature (19)..(19): 2'-deoxy-2'Fluoro
  misc_feature (20)..(21): 2'-O-methyl
gaccagacucugccuuggcuu

SEQ ID NO: 2580 - RNA, 21 nt, Artificial Sequence
  Description of Artificial Sequence: Target Sequence/siNA antisense region (stab36)
  misc_feature (4)..(4): 2'-deoxy-2'Fluoro
  misc_feature (5)..(7): 2'-O-methyl
  misc_feature (8)..(11): 2'-deoxy-2'Fluoro
  misc_feature (12)..(12): 2'-O-methyl
  misc_feature (13)..(16): 2'-deoxy-2'Fluoro
  misc_feature (17)..(18): 2'-O-methyl
  misc_feature (19)..(19): 2'-deoxy-2'Fluoro
  misc_feature (20)..(21): 2'-O-methyl
gaccagacucugccuuggcac

SEQ ID NO: 2581 - RNA, 19 nt, Artificial Sequence
  Description of Artificial Sequence: Target Sequence/siNA sense region
ccagccagccugaccaucu

SEQ ID NO: 2582 - RNA, 19 nt, Artificial Sequence
  Description of Artificial Sequence: Target Sequence/siNA antisense region
agauggucaggcuggcugg

SEQ ID NO: 2583 - DNA, 21 bp, Artificial Sequence
  Description of Artificial Sequence: Target Sequence/siNA sense region (stab00)
  misc_feature (1)..(19): ribonucleotide unmodified or modified as described for this sequence
ccagccagccugaccaucutt

SEQ ID NO: 2584 - DNA, 21 bp, Artificial Sequence
  Description of Artificial Sequence: Target Sequence/siNA antisense region (stab00as)
  misc_feature (1)..(19): ribonucleotide unmodified or modified as described for this sequence
agauggucaggcuggcuggtt

SEQ ID NO: 2585 - DNA, 21 bp, Artificial Sequence
  Description of Artificial Sequence: Target Sequence/siNA sense region (stab04)
  misc_feature (1)..(1): 5'-3 attached terminal deoxyabasic moiety, inverted abasic, inverted nucleotide or other terminal cap that is optionally present
  misc_feature (21)..(21): 3'-3 attached terminal deoxyabasic moiety, inverted abasic, inverted nucleotide or other terminal cap that is optionally present
  misc_feature (1)..(2): 2'-deoxy-2'Fluoro
  misc_feature (5)..(6): 2'-deoxy-2'Fluoro
  misc_feature (9)..(11): 2'-deoxy-2'Fluoro
  misc_feature (14)..(15): 2'-deoxy-2'Fluoro
  misc_feature (17)..(19): 2'-deoxy-2'Fluoro
  misc_feature (1)..(19): ribonucleotide unmodified or modified as described for this sequence
ccagccagccugaccaucutt

SEQ ID NO: 2586 - DNA, 21 bp, Artificial Sequence
  Description of Artificial Sequence: Target Sequence/siNA antisense region (stab05)
  misc_feature (4)..(4): 2'-deoxy-2'Fluoro
  misc_feature (7)..(8): 2'-deoxy-2'Fluoro
  misc_feature (12)..(13): 2'-deoxy-2'Fluoro
  misc_feature (16)..(17): 2'-deoxy-2'Fluoro
  misc_feature (20)..(20): Phosphorothioate or Phosphorodithioate 3'-Internucleotide Linkage (optionally present)
  misc_feature (1)..(19): ribonucleotide unmodified or modified as described for this sequence
agauggucaggcuggcuggtt

SEQ ID NO: 2587 - DNA, 21 bp, Artificial Sequence
  Description of Artificial Sequence: Target Sequence/siNA sense region (stab07)
  misc_feature (1)..(1): 5'-3 attached terminal deoxyabasic moiety, inverted abasic, inverted nucleotide or other terminal cap that is optionally present
  misc_feature (21)..(21): 3'-3 attached terminal deoxyabasic moiety, inverted abasic, inverted nucleotide or other terminal cap that is optionally present
  misc_feature (1)..(2): 2'-deoxy-2'Fluoro
  misc_feature (5)..(6): 2'-deoxy-2'Fluoro
  misc_feature (9)..(11): 2'-deoxy-2'Fluoro
  misc_feature (14)..(15): 2'-deoxy-2'Fluoro
  misc_feature (17)..(19): 2'-deoxy-2'Fluoro
  misc_feature (1)..(19): ribonucleotide unmodified or modified as described for this sequence
ccagccagccugaccaucutt

SEQ ID NO: 2588 - DNA, 21 bp, Artificial Sequence
  Description of Artificial Sequence: Target Sequence/siNA antisense region (stab08)
  misc_feature (1)..(3): 2'-O-methyl
  misc_feature (4)..(4): 2'-deoxy-2'Fluoro
  misc_feature (5)..(6): 2'-O-methyl
  misc_feature (7)..(8): 2'-deoxy-2'Fluoro
  misc_feature (9)..(11): 2'-O-methyl
  misc_feature (12)..(13): 2'-deoxy-2'Fluoro
  misc_feature (14)..(15): 2'-O-methyl
  misc_feature (16)..(17): 2'-deoxy-2'Fluoro
  misc_feature (18)..(19): 2'-O-methyl
  misc_feature (20)..(20): Phosphorothioate or Phosphorodithioate 3'-Internucleotide Linkage (optionally present)
  misc_feature (1)..(19): ribonucleotide unmodified or modified as described for this sequence
agauggucaggcuggcuggtt

SEQ ID NO: 2589 - DNA, 21 bp, Artificial Sequence
  Description of Artificial Sequence: Target Sequence/siNA sense region (stab09)
  misc_feature (1)..(1): 5'-3 attached terminal deoxyabasic moiety, inverted abasic, inverted nucleotide or other terminal cap that is optionally present
  misc_feature (21)..(21): 3'-3 attached terminal deoxyabasic moiety, inverted abasic, inverted nucleotide or other terminal cap that is optionally present
  misc_feature (1)..(19): ribonucleotide unmodified or modified as described for this sequence
ccagccagccugaccaucutt

SEQ ID NO: 2590 - DNA, 21 bp, Artificial Sequence
  Description of Artificial Sequence: Target Sequence/siNA antisense region (stab10)
  misc_feature (20)..(20): Phosphorothioate or Phosphorodithioate 3'-Internucleotide Linkage (optionally present)
  misc_feature (1)..(19): ribonucleotide unmodified or modified as described for this sequence
agauggucaggcuggcuggtt

SEQ ID NO: 2591 - DNA, 21 bp, Artificial Sequence
  Description of Artificial Sequence: Target Sequence/siNA antisense region (stab19)
  misc_feature (21)..(21): 3'-3 attached terminal deoxyabasic moiety, inverted abasic, inverted nucleotide or other terminal cap that is optionally present
  misc_feature (1)..(3): 2'-O-methyl
  misc_feature (4)..(4): 2'-deoxy-2'Fluoro
  misc_feature (5)..(6): 2'-O-methyl
  misc_feature (7)..(8): 2'-deoxy-2'Fluoro
  misc_feature (9)..(11): 2'-O-methyl
  misc_feature (12)..(13): 2'-deoxy-2'Fluoro
  misc_feature (14)..(15): 2'-O-methyl
  misc_feature (16)..(17): 2'-deoxy-2'Fluoro
  misc_feature (18)..(19): 2'-O-methyl
  misc_feature (1)..(19): ribonucleotide unmodified or modified as described for this sequence
agauggucaggcuggcuggtt

SEQ ID NO: 2592 - DNA, 21 bp, Artificial Sequence
  Description of Artificial Sequence: Target Sequence/siNA antisense region (stab22)
  misc_feature (21)..(21): 3'-3 attached terminal deoxyabasic moiety, inverted abasic, inverted nucleotide or other terminal cap that is optionally present
  misc_feature (20)..(20): Phosphorothioate or Phosphorodithioate 3'-Internucleotide Linkage (optionally present)
  misc_feature (1)..(19): ribonucleotide unmodified or modified as described for this sequence
agauggucaggcuggcuggtt

SEQ ID NO: 2593 - DNA, 21 bp, Artificial Sequence
  Description of Artificial Sequence: Target Sequence/siNA antisense region (stab25)
  misc_feature (4)..(4): 2'-deoxy-2'Fluoro
  misc_feature (5)..(6): 2'-O-methyl
  misc_feature (7)..(8): 2'-deoxy-2'Fluoro
  misc_feature (9)..(11): 2'-O-methyl
  misc_feature (12)..(13): 2'-deoxy-2'Fluoro
  misc_feature (14)..(15): 2'-O-methyl
  misc_feature (16)..(17): 2'-deoxy-2'Fluoro
  misc_feature (18)..(19): 2'-O-methyl
  misc_feature (20)..(20): Phosphorothioate or Phosphorodithioate 3'-Internucleotide Linkage (optionally present)
  misc_feature (1)..(19): ribonucleotide unmodified or modified as described for this sequence
agauggucaggcuggcuggtt

SEQ ID NO: 2594 - RNA, 21 nt, Artificial Sequence
  Description of Artificial Sequence: Target Sequence/siNA antisense region (stab35)
  misc_feature (4)..(4): 2'-deoxy-2'Fluoro
  misc_feature (5)..(6): 2'-O-methyl
  misc_feature (7)..(8): 2'-deoxy-2'Fluoro
  misc_feature (9)..(11): 2'-O-methyl
  misc_feature (12)..(13): 2'-deoxy-2'Fluoro
  misc_feature (14)..(15): 2'-O-methyl
  misc_feature (16)..(17): 2'-deoxy-2'Fluoro
  misc_feature (18)..(21): 2'-O-methyl
agauggucaggcuggcugguu

SEQ ID NO: 2595 - RNA, 21 nt, Artificial Sequence
  Description of Artificial Sequence: Target Sequence/siNA antisense region (stab36)
  misc_feature (4)..(4): 2'-deoxy-2'Fluoro
  misc_feature (5)..(6): 2'-O-methyl
  misc_feature (7)..(8): 2'-deoxy-2'Fluoro
  misc_feature (9)..(11): 2'-O-methyl
  misc_feature (12)..(13): 2'-deoxy-2'Fluoro
  misc_feature (14)..(15): 2'-O-methyl
  misc_feature (16)..(17): 2'-deoxy-2'Fluoro
  misc_feature (18)..(21): 2'-O-methyl
agauggucaggcuggcuggac

SEQ ID NO: 2596 - RNA, 19 nt, Artificial Sequence
  Description of Artificial Sequence: Target Sequence/siNA sense region
ugugagaaggccagugggu

SEQ ID NO: 2597 - RNA, 19 nt, Artificial Sequence
  Description of Artificial Sequence: Target Sequence/siNA antisense region
acccacuggccuucucaca

SEQ ID NO: 2598 - DNA, 21 bp, Artificial Sequence
  Description of Artificial Sequence: Target Sequence/siNA sense region (stab00)
  misc_feature (1)..(19): ribonucleotide unmodified or modified as described for this sequence
ugugagaaggccagugggutt

SEQ ID NO: 2599 - DNA, 21 bp, Artificial Sequence
  Description of Artificial Sequence: Target Sequence/siNA antisense region (stab00as)
  misc_feature (1)..(19): ribonucleotide unmodified or modified as described for this sequence
acccacuggccuucucacatt

SEQ ID NO: 2600 - DNA, 21 bp, Artificial Sequence
  Description of Artificial Sequence: Target Sequence/siNA sense region (stab04)
  misc_feature (1)..(1): 5'-3 attached terminal deoxyabasic moiety, inverted abasic, inverted nucleotide or other terminal cap that is optionally present
  misc_feature (21)..(21): 3'-3 attached terminal deoxyabasic moiety, inverted abasic, inverted nucleotide or other terminal cap that is optionally present
  misc_feature (1)..(1): 2'-deoxy-2'Fluoro
  misc_feature (3)..(3): 2'-deoxy-2'Fluoro
  misc_feature (11)..(12): 2'-deoxy-2'Fluoro
  misc_feature (15)..(15): 2'-deoxy-2'Fluoro
  misc_feature (19)..(19): 2'-deoxy-2'Fluoro
  misc_feature (1)..(19): ribonucleotide unmodified or modified as described for this sequence
ugugagaaggccagugggutt

SEQ ID NO: 2601 - DNA, 21 bp, Artificial Sequence
  Description of Artificial Sequence: Target Sequence/siNA antisense region (stab05)
  misc_feature (2)..(4): 2'-deoxy-2'Fluoro
  misc_feature (6)..(7): 2'-deoxy-2'Fluoro
  misc_feature (10)..(16): 2'-deoxy-2'Fluoro
  misc_feature (18)..(18): 2'-deoxy-2'Fluoro
  misc_feature (20)..(20): Phosphorothioate or Phosphorodithioate 3'-Internucleotide Linkage (optionally present)
  misc_feature (1)..(19): ribonucleotide unmodified or modified as described for this sequence
acccacuggccuucucacatt

SEQ ID NO: 2602 - DNA, 21 bp, Artificial Sequence
  Description of Artificial Sequence: Target Sequence/siNA sense region (stab07)
  misc_feature (1)..(1): 5'-3 attached terminal deoxyabasic moiety, inverted abasic, inverted nucleotide or other terminal cap that is optionally present
  misc_feature (21)..(21): 3'-3 attached terminal deoxyabasic moiety, inverted abasic, inverted nucleotide or other terminal cap that is optionally present
  misc_feature (1)..(1): 2'-deoxy-2'Fluoro
  misc_feature (3)..(3): 2'-deoxy-2'Fluoro
  misc_feature (11)..(12): 2'-deoxy-2'Fluoro
  misc_feature (15)..(15): 2'-deoxy-2'Fluoro
  misc_feature (19)..(19): 2'-deoxy-2'Fluoro
  misc_feature (1)..(19): ribonucleotide unmodified or modified as described for this sequence
ugugagaaggccagugggutt

SEQ ID NO: 2603 - DNA, 21 bp, Artificial Sequence
  Description of Artificial Sequence: Target Sequence/siNA antisense region (stab08)
  misc_feature (1)..(1): 2'-O-methyl
  misc_feature (2)..(4): 2'-deoxy-2'Fluoro
  misc_feature (5)..(5): 2'-O-methyl
  misc_feature (6)..(7): 2'-deoxy-2'Fluoro
  misc_feature (8)..(9): 2'-O-methyl
  misc_feature (10)..(16): 2'-deoxy-2'Fluoro
  misc_feature (17)..(17): 2'-O-methyl
  misc_feature (18)..(18): 2'-deoxy-2'Fluoro
  misc_feature (19)..(19): 2'-O-methyl
  misc_feature (20)..(20): Phosphorothioate or Phosphorodithioate 3'-Internucleotide Linkage (optionally present)
  misc_feature (1)..(19): ribonucleotide unmodified or modified as described for this sequence
acccacuggccuucucacatt

SEQ ID NO: 2604 - DNA, 21 bp, Artificial Sequence
  Description of Artificial Sequence: Target Sequence/siNA sense region (stab09)
  misc_feature (1)..(1): 5'-3 attached terminal deoxyabasic moiety, inverted abasic, inverted nucleotide or other terminal cap that is optionally present
  misc_feature (21)..(21): 3'-3 attached terminal deoxyabasic moiety, inverted abasic, inverted nucleotide or other terminal cap that is optionally present
  misc_feature (1)..(19): ribonucleotide unmodified or modified as described for this sequence
ugugagaaggccagugggutt

SEQ ID NO: 2605 - DNA, 21 bp, Artificial Sequence
  Description of Artificial Sequence: Target Sequence/siNA antisense region (stab10)
  misc_feature (20)..(20): Phosphorothioate or Phosphorodithioate 3'-Internucleotide Linkage (optionally present)
  misc_feature (1)..(19): ribonucleotide unmodified or modified as described for this sequence
acccacuggccuucucacatt

SEQ ID NO: 2606 - DNA, 21 bp, Artificial Sequence
  Description of Artificial Sequence: Target Sequence/siNA antisense region (stab19)
  misc_feature (21)..(21): 3'-3 attached terminal deoxyabasic moiety, inverted abasic, inverted nucleotide or other terminal cap that is optionally present
  misc_feature (1)..(1): 2'-O-methyl
  misc_feature (2)..(4): 2'-deoxy-2'Fluoro
  misc_feature (5)..(5): 2'-O-methyl
  misc_feature (6)..(7): 2'-deoxy-2'Fluoro
  misc_feature (8)..(9): 2'-O-methyl
  misc_feature (10)..(16): 2'-deoxy-2'Fluoro
  misc_feature (17)..(17): 2'-O-methyl
  misc_feature (18)..(18): 2'-deoxy-2'Fluoro
  misc_feature (19)..(19): 2'-O-methyl
  misc_feature (1)..(19): ribonucleotide unmodified or modified as described for this sequence
acccacuggccuucucacatt

SEQ ID NO: 2607 - DNA, 21 bp, Artificial Sequence
  Description of Artificial Sequence: Target Sequence/siNA antisense region (stab22)
  misc_feature (21)..(21): 3'-3 attached terminal deoxyabasic moiety, inverted abasic, inverted nucleotide or other terminal cap that is optionally present
  misc_feature (20)..(20): Phosphorothioate or Phosphorodithioate 3'-Internucleotide Linkage (optionally present)
  misc_feature (1)..(19): ribonucleotide unmodified or modified as described for this sequence
acccacuggccuucucacatt

SEQ ID NO: 2608 - DNA, 21 bp, Artificial Sequence
  Description of Artificial Sequence: Target Sequence/siNA antisense region (stab25)
  misc_feature (4)..(4): 2'-deoxy-2'Fluoro
  misc_feature (5)..(5): 2'-O-methyl
  misc_feature (6)..(7): 2'-deoxy-2'Fluoro
  misc_feature (8)..(9): 2'-O-methyl
  misc_feature (10)..(16): 2'-deoxy-2'Fluoro
  misc_feature (17)..(17): 2'-O-methyl
  misc_feature (18)..(18): 2'-deoxy-2'Fluoro
  misc_feature (19)..(19): 2'-O-methyl
  misc_feature (20)..(20): Phosphorothioate or Phosphorodithioate 3'-Internucleotide Linkage (optionally present)
  misc_feature (1)..(19): ribonucleotide unmodified or modified as described for this sequence
acccacuggccuucucacatt

SEQ ID NO: 2609 - RNA, 21 nt, Artificial Sequence
  Description of Artificial Sequence: Target Sequence/siNA antisense region (stab35)
  misc_feature (4)..(4): 2'-deoxy-2'Fluoro
  misc_feature (5)..(5): 2'-O-methyl
  misc_feature (6)..(7): 2'-deoxy-2'Fluoro
  misc_feature (8)..(9): 2'-O-methyl
  misc_feature (10)..(16): 2'-deoxy-2'Fluoro
  misc_feature (17)..(17): 2'-O-methyl
  misc_feature (18)..(18): 2'-deoxy-2'Fluoro
  misc_feature (19)..(21): 2'-O-methyl
acccacuggccuucucacauu

SEQ ID NO: 2610 - RNA, 21 nt, Artificial Sequence
  Description of Artificial Sequence: Target Sequence/siNA antisense region (stab36)
  misc_feature (4)..(4): 2'-deoxy-2'Fluoro
  misc_feature (5)..(5): 2'-O-methyl
  misc_feature (6)..(7): 2'-deoxy-2'Fluoro
  misc_feature (8)..(9): 2'-O-methyl
  misc_feature (10)..(16): 2'-deoxy-2'Fluoro
  misc_feature (17)..(17): 2'-O-methyl
  misc_feature (18)..(18): 2'-deoxy-2'Fluoro
  misc_feature (19)..(21): 2'-O-methyl
acccacuggccuucucacaga

SEQ ID NO: 2611 - RNA, 19 nt, Artificial Sequence
  Description of Artificial Sequence: Target Sequence/siNA sense region
uaccugcaggacagccugg

SEQ ID NO: 2612 - RNA, 19 nt, Artificial Sequence
  Description of Artificial Sequence: Target Sequence/siNA antisense region
ccaggcuguccugcaggua

SEQ ID NO: 2613 - DNA, 21 bp, Artificial Sequence
  Description of Artificial Sequence: Target Sequence/siNA sense region (stab00)
  misc_feature (1)..(19): ribonucleotide unmodified or modified as described for this sequence
uaccugcaggacagccuggtt

SEQ ID NO: 2614 - DNA, 21 bp, Artificial Sequence
  Description of Artificial Sequence: Target Sequence/siNA antisense region (stab00as)
  misc_feature (1)..(19): ribonucleotide unmodified or modified as described for this sequence
ccaggcuguccugcagguatt

SEQ ID NO: 2615 - DNA, 21 bp, Artificial Sequence
  Description of Artificial Sequence: Target Sequence/siNA sense region (stab04)
  misc_feature (1)..(1): 5'-3 attached terminal deoxyabasic moiety, inverted abasic, inverted nucleotide or other terminal cap that is optionally present
  misc_feature (21)..(21): 3'-3 attached terminal deoxyabasic moiety, inverted abasic, inverted nucleotide or other terminal cap that is optionally present
  misc_feature (1)..(1): 2'-deoxy-2'Fluoro
  misc_feature (3)..(5): 2'-deoxy-2'Fluoro
  misc_feature (7)..(7): 2'-deoxy-2'Fluoro
  misc_feature (12)..(12): 2'-deoxy-2'Fluoro
  misc_feature (15)..(17): 2'-deoxy-2'Fluoro
  misc_feature (1)..(19): ribonucleotide unmodified or modified as described for this sequence
uaccugcaggacagccuggtt

SEQ ID NO: 2616 - DNA, 21 bp, Artificial Sequence
  Description of Artificial Sequence: Target Sequence/siNA antisense region (stab05)
  misc_feature (1)..(2): 2'-deoxy-2'Fluoro
  misc_feature (6)..(7): 2'-deoxy-2'Fluoro
  misc_feature (9)..(12): 2'-deoxy-2'Fluoro
  misc_feature (14)..(14): 2'-deoxy-2'Fluoro
  misc_feature (18)..(18): 2'-deoxy-2'Fluoro
  misc_feature (20)..(20): Phosphorothioate or Phosphorodithioate 3'-Internucleotide Linkage (optionally present)
  misc_feature (1)..(19): ribonucleotide unmodified or modified as described for this sequence
ccaggcuguccugcagguatt

SEQ ID NO: 2617 - DNA, 21 bp, Artificial Sequence
  Description of Artificial Sequence: Target Sequence/siNA sense region (stab07)
  misc_feature (1)..(1): 5'-3 attached terminal deoxyabasic moiety, inverted abasic, inverted nucleotide or other terminal cap that is optionally present
  misc_feature (21)..(21): 3'-3 attached terminal deoxyabasic moiety, inverted abasic, inverted nucleotide or other terminal cap that is optionally present
  misc_feature (1)..(1): 2'-deoxy-2'Fluoro
  misc_feature (3)..(5): 2'-deoxy-2'Fluoro
  misc_feature (7)..(7): 2'-deoxy-2'Fluoro
  misc_feature (12)..(12): 2'-deoxy-2'Fluoro
  misc_feature (15)..(17): 2'-deoxy-2'Fluoro
  misc_feature (1)..(19): ribonucleotide unmodified or modified as described for this sequence
uaccugcaggacagccuggtt

SEQ ID NO: 2618 - DNA, 21 bp, Artificial Sequence
  Description of Artificial Sequence: Target Sequence/siNA antisense region (stab08)
  misc_feature (1)..(2): 2'-deoxy-2'Fluoro
  misc_feature (3)..(5): 2'-O-methyl
  misc_feature (6)..(7): 2'-deoxy-2'Fluoro
  misc_feature (8)..(8): 2'-O-methyl
  misc_feature (9)..(12): 2'-deoxy-2'Fluoro
  misc_feature (13)..(13): 2'-O-methyl
  misc_feature (14)..(14): 2'-deoxy-2'Fluoro
  misc_feature (15)..(17): 2'-O-methyl
  misc_feature (18)..(18): 2'-deoxy-2'Fluoro
  misc_feature (19)..(19): 2'-O-methyl
  misc_feature (20)..(20): Phosphorothioate or Phosphorodithioate 3'-Internucleotide Linkage (optionally present)
  misc_feature (1)..(19): ribonucleotide unmodified or modified as described for this sequence
ccaggcuguccugcagguatt

SEQ ID NO: 2619 - DNA, 21 bp, Artificial Sequence
  Description of Artificial Sequence: Target Sequence/siNA sense region (stab09)
  misc_feature (1)..(1): 5'-3 attached terminal deoxyabasic moiety, inverted abasic, inverted nucleotide or other terminal cap that is optionally present
  misc_feature (21)..(21): 3'-3 attached terminal deoxyabasic moiety, inverted abasic, inverted nucleotide or other terminal cap that is optionally present
  misc_feature (1)..(19): ribonucleotide unmodified or modified as described for this sequence
uaccugcaggacagccuggtt

SEQ ID NO: 2620 - DNA, 21 bp, Artificial Sequence
  Description of Artificial Sequence: Target Sequence/siNA antisense region (stab10)
  misc_feature (20)..(20): Phosphorothioate or Phosphorodithioate 3'-Internucleotide Linkage (optionally present)
  misc_feature (1)..(19): ribonucleotide unmodified or modified as described for this sequence
ccaggcuguccugcagguatt

SEQ ID NO: 2621 - DNA, 21 bp, Artificial Sequence
  Description of Artificial Sequence: Target Sequence/siNA antisense region (stab19)
  misc_feature (21)..(21): 3'-3 attached terminal deoxyabasic moiety, inverted abasic, inverted nucleotide or other terminal cap that is optionally present
  misc_feature (1)..(2): 2'-deoxy-2'Fluoro
  misc_feature (3)..(5): 2'-O-methyl
  misc_feature (6)..(7): 2'-deoxy-2'Fluoro
  misc_feature (8)..(8): 2'-O-methyl
  misc_feature (9)..(12): 2'-deoxy-2'Fluoro
  misc_feature (13)..(13): 2'-O-methyl
  misc_feature (14)..(14): 2'-deoxy-2'Fluoro
  misc_feature (15)..(17): 2'-O-methyl
  misc_feature (18)..(18): 2'-deoxy-2'Fluoro
  misc_feature (19)..(19): 2'-O-methyl
  misc_feature (1)..(19): ribonucleotide unmodified or modified as described for this sequence
ccaggcuguccugcagguatt

SEQ ID NO: 2622 - DNA, 21 bp, Artificial Sequence
  Description of Artificial Sequence: Target Sequence/siNA antisense region (stab22)
  misc_feature (21)..(21): 3'-3 attached terminal deoxyabasic moiety, inverted abasic, inverted nucleotide or other terminal cap that is optionally present
  misc_feature (20)..(20): Phosphorothioate or Phosphorodithioate 3'-Internucleotide Linkage (optionally present)
  misc_feature (1)..(19): ribonucleotide unmodified or modified as described for this sequence
ccaggcuguccugcagguatt

SEQ ID NO: 2623 - DNA, 21 bp, Artificial Sequence
  Description of Artificial Sequence: Target Sequence/siNA antisense region (stab25)
  misc_feature (4)..(5): 2'-O-methyl
  misc_feature (6)..(7): 2'-deoxy-2'Fluoro
  misc_feature (8)..(8): 2'-O-methyl
  misc_feature (9)..(12): 2'-deoxy-2'Fluoro
  misc_feature (13)..(13): 2'-O-methyl
  misc_feature (14)..(14): 2'-deoxy-2'Fluoro
  misc_feature (15)..(17): 2'-O-methyl
  misc_feature (18)..(18): 2'-deoxy-2'Fluoro
  misc_feature (19)..(19): 2'-O-methyl
  misc_feature (20)..(20): Phosphorothioate or Phosphorodithioate 3'-Internucleotide Linkage (optionally present)
  misc_feature (1)..(19): ribonucleotide unmodified or modified as described for this sequence
ccaggcuguccugcagguatt

SEQ ID NO: 2624 - RNA, 21 nt, Artificial Sequence
  Description of Artificial Sequence: Target Sequence/siNA antisense region (stab35)
  misc_feature (4)..(5): 2'-O-methyl
  misc_feature (6)..(7): 2'-deoxy-2'Fluoro
  misc_feature (8)..(8): 2'-O-methyl
  misc_feature (9)..(12): 2'-deoxy-2'Fluoro
  misc_feature (13)..(13): 2'-O-methyl
  misc_feature (14)..(14): 2'-deoxy-2'Fluoro
  misc_feature (15)..(17): 2'-O-methyl
  misc_feature (18)..(18): 2'-deoxy-2'Fluoro
  misc_feature (19)..(21): 2'-O-methyl
ccaggcuguccugcagguauu

SEQ ID NO: 2625 - RNA, 21 nt, Artificial Sequence
  Description of Artificial Sequence: Target Sequence/siNA antisense region (stab36)
  misc_feature (4)..(5): 2'-O-methyl
  misc_feature (6)..(7): 2'-deoxy-2'Fluoro
  misc_feature (8)..(8): 2'-O-methyl
  misc_feature (9)..(12): 2'-deoxy-2'Fluoro
  misc_feature (13)..(13): 2'-O-methyl
  misc_feature (14)..(14): 2'-deoxy-2'Fluoro
  misc_feature (15)..(17): 2'-O-methyl
  misc_feature (18)..(18): 2'-deoxy-2'Fluoro
  misc_feature (19)..(21): 2'-O-methyl
ccaggcuguccugcagguacc

SEQ ID NO: 2626 - RNA, 19 nt, Artificial Sequence
  Description of Artificial Sequence: Target Sequence/siNA sense region
gcuaccacaccagccagca

SEQ ID NO: 2627 - RNA, 19 nt, Artificial Sequence
  Description of Artificial Sequence: Target Sequence/siNA antisense region
ugcuggcuggugugguagc

SEQ ID NO: 2628 - DNA, 21 bp, Artificial Sequence
  Description of Artificial Sequence: Target Sequence/siNA sense region (stab00)
  misc_feature (1)..(19): ribonucleotide unmodified or modified as described for this sequence
gcuaccacaccagccagcatt

SEQ ID NO: 2629 - DNA, 21 bp, Artificial Sequence
  Description of Artificial Sequence: Target Sequence/siNA antisense region (stab00as)
  misc_feature (1)..(19): ribonucleotide unmodified or modified as described for this sequence
ugcuggcuggugugguagctt

SEQ ID NO: 2630 - DNA, 21 bp, Artificial Sequence
  Description of Artificial Sequence: Target Sequence/siNA sense region (stab04)
  misc_feature (1)..(1): 5'-3 attached terminal deoxyabasic moiety, inverted abasic, inverted nucleotide or other terminal cap that is optionally present
  misc_feature (21)..(21): 3'-3 attached terminal deoxyabasic moiety, inverted abasic, inverted nucleotide or other terminal cap that is optionally present
  misc_feature (2)..(3): 2'-deoxy-2'Fluoro
  misc_feature (5)..(6): 2'-deoxy-2'Fluoro
  misc_feature (8)..(8): 2'-deoxy-2'Fluoro
  misc_feature (10)..(11): 2'-deoxy-2'Fluoro
  misc_feature (14)..(15): 2'-deoxy-2'Fluoro
  misc_feature (18)..(18): 2'-deoxy-2'Fluoro
  misc_feature (1)..(19): ribonucleotide unmodified or modified as described for this sequence
gcuaccacaccagccagcatt

SEQ ID NO: 2631 - DNA, 21 bp, Artificial Sequence
  Description of Artificial Sequence: Target Sequence/siNA antisense region (stab05)
  misc_feature (1)..(1): 2'-deoxy-2'Fluoro
  misc_feature (3)..(4): 2'-deoxy-2'Fluoro
  misc_feature (7)..(8): 2'-deoxy-2'Fluoro
  misc_feature (11)..(11): 2'-deoxy-2'Fluoro
  misc_feature (13)..(13): 2'-deoxy-2'Fluoro
  misc_feature (16)..(16): 2'-deoxy-2'Fluoro
  misc_feature (19)..(19): 2'-deoxy-2'Fluoro
  misc_feature (20)..(20): Phosphorothioate or Phosphorodithioate 3'-Internucleotide Linkage (optionally present)
  misc_feature (1)..(19): ribonucleotide unmodified or modified as described for this sequence
ugcuggcuggugugguagctt

SEQ ID NO: 2632 - DNA, 21 bp, Artificial Sequence
  Description of Artificial Sequence: Target Sequence/siNA sense region (stab07)
  misc_feature (1)..(1): 5'-3 attached terminal deoxyabasic moiety, inverted abasic, inverted nucleotide or other terminal cap that is optionally present
  misc_feature (21)..(21): 3'-3 attached terminal deoxyabasic moiety, inverted abasic, inverted nucleotide or other terminal cap that is optionally present
  misc_feature (2)..(3): 2'-deoxy-2'Fluoro
  misc_feature (5)..(6): 2'-deoxy-2'Fluoro
  misc_feature (8)..(8): 2'-deoxy-2'Fluoro
  misc_feature (10)..(11): 2'-deoxy-2'Fluoro
  misc_feature (14)..(15): 2'-deoxy-2'Fluoro
  misc_feature (18)..(18): 2'-deoxy-2'Fluoro
  misc_feature (1)..(19): ribonucleotide unmodified or modified as described for this sequence
gcuaccacaccagccagcatt

SEQ ID NO: 2633 - DNA, 21 bp, Artificial Sequence
  Description of Artificial Sequence: Target Sequence/siNA antisense region (stab08)
  misc_feature (1)..(1): 2'-deoxy-2'Fluoro
  misc_feature (2)..(2): 2'-O-methyl
  misc_feature (3)..(4): 2'-deoxy-2'Fluoro
  misc_feature (5)..(6): 2'-O-methyl
  misc_feature (7)..(8): 2'-deoxy-2'Fluoro
  misc_feature (9)..(10): 2'-O-methyl
  misc_feature (11)..(11): 2'-deoxy-2'Fluoro
  misc_feature (12)..(12): 2'-O-methyl
  misc_feature (13)..(13): 2'-deoxy-2'Fluoro
  misc_feature (14)..(15): 2'-O-methyl
  misc_feature (16)..(16): 2'-deoxy-2'Fluoro
  misc_feature (17)..(18): 2'-O-methyl
  misc_feature (19)..(19): 2'-deoxy-2'Fluoro
  misc_feature (20)..(20): Phosphorothioate or Phosphorodithioate 3'-Internucleotide Linkage (optionally present)
  misc_feature (1)..(19): ribonucleotide unmodified or modified as described for this sequence
ugcuggcuggugugguagctt

SEQ ID NO: 2634 - DNA, 21 bp, Artificial Sequence
  Description of Artificial Sequence: Target Sequence/siNA sense region (stab09)
  misc_feature (1)..(1): 5'-3 attached terminal deoxyabasic moiety, inverted abasic, inverted nucleotide or other terminal cap that is optionally present
  misc_feature (21)..(21): 3'-3 attached terminal deoxyabasic moiety, inverted abasic, inverted nucleotide or other terminal cap that is optionally present
  misc_feature (1)..(19): ribonucleotide unmodified or modified as described for this sequence
gcuaccacaccagccagcatt

SEQ ID NO: 2635 - DNA, 21 bp, Artificial Sequence
  Description of Artificial Sequence: Target Sequence/siNA antisense region (stab10)
  misc_feature (20)..(20): Phosphorothioate or Phosphorodithioate 3'-Internucleotide Linkage (optionally present)
  misc_feature (1)..(19): ribonucleotide unmodified or modified as described for this sequence
ugcuggcuggugugguagctt

SEQ ID NO: 2636 - DNA, 21 bp, Artificial Sequence
  Description of Artificial Sequence: Target Sequence/siNA antisense region (stab19)
  misc_feature (21)..(21): 3'-3 attached terminal deoxyabasic moiety, inverted abasic, inverted nucleotide or other terminal cap that is optionally present
  misc_feature (1)..(1): 2'-deoxy-2'Fluoro
  misc_feature (2)..(2): 2'-O-methyl
  misc_feature (3)..(4): 2'-deoxy-2'Fluoro
  misc_feature (5)..(6): 2'-O-methyl
  misc_feature (7)..(8): 2'-deoxy-2'Fluoro
  misc_feature (9)..(10): 2'-O-methyl
  misc_feature (11)..(11): 2'-deoxy-2'Fluoro
  misc_feature (12)..(12): 2'-O-methyl
  misc_feature (13)..(13): 2'-deoxy-2'Fluoro
  misc_feature (14)..(15): 2'-O-methyl
  misc_feature (16)..(16): 2'-deoxy-2'Fluoro
  misc_feature (17)..(18): 2'-O-methyl
  misc_feature (19)..(19): 2'-deoxy-2'Fluoro
  misc_feature (1)..(19): ribonucleotide unmodified or modified as described for this sequence
ugcuggcuggugugguagctt

SEQ ID NO: 2637 - DNA, 21 bp, Artificial Sequence
  Description of Artificial Sequence: Target Sequence/siNA antisense region (stab22)
  misc_feature (21)..(21): 3'-3 attached terminal deoxyabasic moiety, inverted abasic, inverted nucleotide or other terminal cap that is optionally present
  misc_feature (20)..(20): Phosphorothioate or Phosphorodithioate 3'-Internucleotide Linkage (optionally present)
  misc_feature (1)..(19): ribonucleotide unmodified or modified as described for this sequence
ugcuggcuggugugguagctt

SEQ ID NO: 2638 - DNA, 21 bp, Artificial Sequence
  Description of Artificial Sequence: Target Sequence/siNA antisense region (stab25)
  misc_feature (4)..(4): 2'-deoxy-2'Fluoro
  misc_feature (5)..(6): 2'-O-methyl
  misc_feature (7)..(8): 2'-deoxy-2'Fluoro
  misc_feature (9)..(10): 2'-O-methyl
  misc_feature (11)..(11): 2'-deoxy-2'Fluoro
  misc_feature (12)..(12): 2'-O-methyl
  misc_feature (13)..(13): 2'-deoxy-2'Fluoro
  misc_feature (14)..(15): 2'-O-methyl
  misc_feature (16)..(16): 2'-deoxy-2'Fluoro
  misc_feature (17)..(18): 2'-O-methyl
  misc_feature (19)..(19): 2'-deoxy-2'Fluoro
  misc_feature (20)..(20): Phosphorothioate or Phosphorodithioate 3'-Internucleotide Linkage (optionally present)
  misc_feature (1)..(19): ribonucleotide unmodified or modified as described for this sequence
ugcuggcuggugugguagctt

SEQ ID NO: 2639 - RNA, 21 nt, Artificial Sequence
  Description of Artificial Sequence: Target Sequence/siNA antisense region (stab35)
  misc_feature (4)..(4): 2'-deoxy-2'Fluoro
  misc_feature (5)..(6): 2'-O-methyl
  misc_feature (7)..(8): 2'-deoxy-2'Fluoro
  misc_feature (9)..(10): 2'-O-methyl
  misc_feature (11)..(11): 2'-deoxy-2'Fluoro
  misc_feature (12)..(12): 2'-O-methyl
  misc_feature (13)..(13): 2'-deoxy-2'Fluoro
  misc_feature (14)..(15): 2'-O-methyl
  misc_feature (16)..(16): 2'-deoxy-2'Fluoro
  misc_feature (17)..(18): 2'-O-methyl
  misc_feature (19)..(19): 2'-deoxy-2'Fluoro
  misc_feature (20)..(21): 2'-O-methyl
ugcuggcuggugugguagcuu

SEQ ID NO: 2640 - RNA, 21 nt, Artificial Sequence
  Description of Artificial Sequence: Target Sequence/siNA antisense region (stab36)
  misc_feature (4)..(4): 2'-deoxy-2'Fluoro
  misc_feature (5)..(6): 2'-O-methyl
  misc_feature (7)..(8): 2'-deoxy-2'Fluoro
  misc_feature (9)..(10): 2'-O-methyl
  misc_feature (11)..(11): 2'-deoxy-2'Fluoro
  misc_feature (12)..(12): 2'-O-methyl
  misc_feature (13)..(13): 2'-deoxy-2'Fluoro
  misc_feature (14)..(15): 2'-O-methyl
  misc_feature (16)..(16): 2'-deoxy-2'Fluoro
  misc_feature (17)..(18): 2'-O-methyl
  misc_feature (19)..(19): 2'-deoxy-2'Fluoro
  misc_feature (20)..(21): 2'-O-methyl
ugcuggcuggugugguagcca

SEQ ID NO: 2641 - RNA, 19 nt, Artificial Sequence
  Description of Artificial Sequence: Target Sequence/siNA sense region
agcuccauugacaaggccg

SEQ ID NO: 2642 - RNA, 19 nt, Artificial Sequence
  Description of Artificial Sequence: Target Sequence/siNA antisense region
cggccuugucaauggagcu

SEQ ID NO: 2643 - DNA, 21 bp, Artificial Sequence
  Description of Artificial Sequence: Target Sequence/siNA sense region (stab00)
  misc_feature (1)..(19): ribonucleotide unmodified or modified as described for this sequence
agcuccauugacaaggccgtt

SEQ ID NO: 2644 - DNA, 21 bp, Artificial Sequence
  Description of Artificial Sequence: Target Sequence/siNA antisense region (stab00as)
  misc_feature (1)..(19): ribonucleotide unmodified or modified as described for this sequence
cggccuugucaauggagcutt

SEQ ID NO: 2645 - DNA, 21 bp, Artificial Sequence
  Description of Artificial Sequence: Target Sequence/siNA sense region (stab04)
  misc_feature (1)..(1): 5'-3 attached terminal deoxyabasic moiety, inverted abasic, inverted nucleotide or other terminal cap that is optionally present
  misc_feature (21)..(21): 3'-3 attached terminal deoxyabasic moiety, inverted abasic, inverted nucleotide or other terminal cap that is optionally present
  misc_feature (3)..(6): 2'-deoxy-2'Fluoro
  misc_feature (8)..(9): 2'-deoxy-2'Fluoro
  misc_feature (12)..(12): 2'-deoxy-2'Fluoro
  misc_feature (17)..(18): 2'-deoxy-2'Fluoro
  misc_feature (1)..(19): ribonucleotide unmodified or modified as described for this sequence
agcuccauugacaaggccgtt

SEQ ID NO: 2646 - DNA, 21 bp, Artificial Sequence
  Description of Artificial Sequence: Target Sequence/siNA antisense region (stab05)
  misc_feature (1)..(1): 2'-deoxy-2'Fluoro
  misc_feature (4)..(7): 2'-deoxy-2'Fluoro
  misc_feature (9)..(10): 2'-deoxy-2'Fluoro
  misc_feature (13)..(13): 2'-deoxy-2'Fluoro
  misc_feature (18)..(19): 2'-deoxy-2'Fluoro
  misc_feature (20)..(20): Phosphorothioate or Phosphorodithioate 3'-Internucleotide Linkage (optionally present)
  misc_feature (1)..(19): ribonucleotide unmodified or modified as described for this sequence
cggccuugucaauggagcutt

SEQ ID NO: 2647 - DNA, 21 bp, Artificial Sequence
  Description of Artificial Sequence: Target Sequence/siNA sense region (stab07)
  misc_feature (1)..(1): 5'-3 attached terminal deoxyabasic moiety, inverted abasic, inverted nucleotide or other terminal cap that is optionally present
  misc_feature (21)..(21): 3'-3 attached terminal deoxyabasic moiety, inverted abasic, inverted nucleotide or other terminal cap that is optionally present
  misc_feature (3)..(6): 2'-deoxy-2'Fluoro
  misc_feature (8)..(9): 2'-deoxy-2'Fluoro
  misc_feature (12)..(12): 2'-deoxy-2'Fluoro
  misc_feature (17)..(18): 2'-deoxy-2'Fluoro
  misc_feature (1)..(19): ribonucleotide unmodified or modified as described for this sequence
agcuccauugacaaggccgtt

SEQ ID NO: 2648 - DNA, 21 bp, Artificial Sequence
  Description of Artificial Sequence: Target Sequence/siNA antisense region (stab08)
  misc_feature (1)..(1): 2'-deoxy-2'Fluoro
  misc_feature (2)..(3): 2'-O-methyl
  misc_feature (4)..(7): 2'-deoxy-2'Fluoro
  misc_feature (8)..(8): 2'-O-methyl
  misc_feature (9)..(10): 2'-deoxy-2'Fluoro
  misc_feature (11)..(12): 2'-O-methyl
  misc_feature (13)..(13): 2'-deoxy-2'Fluoro
  misc_feature (14)..(17): 2'-O-methyl
  misc_feature (18)..(19): 2'-deoxy-2'Fluoro
  misc_feature (20)..(20): Phosphorothioate or Phosphorodithioate 3'-Internucleotide Linkage (optionally present)
  misc_feature (1)..(19): ribonucleotide unmodified or modified as described for this sequence
cggccuugucaauggagcutt

SEQ ID NO: 2649 - DNA, 21 bp, Artificial Sequence
  Description of Artificial Sequence: Target Sequence/siNA sense region (stab09)
  misc_feature (1)..(1): 5'-3 attached terminal deoxyabasic moiety, inverted abasic, inverted nucleotide or other terminal cap that is optionally present
  misc_feature (21)..(21): 3'-3 attached terminal deoxyabasic moiety, inverted abasic, inverted nucleotide or other terminal cap that is optionally present
  misc_feature (1)..(19): ribonucleotide unmodified or modified as described for this sequence
agcuccauugacaaggccgtt

SEQ ID NO: 2650 - DNA, 21 bp, Artificial Sequence
  Description of Artificial Sequence: Target Sequence/siNA antisense region (stab10)
  misc_feature (20)..(20): Phosphorothioate or Phosphorodithioate 3'-Internucleotide Linkage (optionally present)
  misc_feature (1)..(19): ribonucleotide unmodified or modified as described for this sequence
cggccuugucaauggagcutt

SEQ ID NO: 2651 - DNA, 21 bp, Artificial Sequence
  Description of Artificial Sequence: Target Sequence/siNA antisense region (stab19)
  misc_feature (21)..(21): 3'-3 attached terminal deoxyabasic moiety, inverted abasic, inverted nucleotide or other terminal cap that is optionally present
  misc_feature (1)..(1): 2'-deoxy-2'Fluoro
  misc_feature (2)..(3): 2'-O-methyl
  misc_feature (4)..(7): 2'-deoxy-2'Fluoro
  misc_feature (8)..(8): 2'-O-methyl
  misc_feature (9)..(10): 2'-deoxy-2'Fluoro
  misc_feature (11)..(12): 2'-O-methyl
  misc_feature (13)..(13): 2'-deoxy-2'Fluoro
  misc_feature (14)..(17): 2'-O-methyl
  misc_feature (18)..(19): 2'-deoxy-2'Fluoro
  misc_feature (1)..(19): ribonucleotide unmodified or modified as described for this sequence
cggccuugucaauggagcutt

SEQ ID NO: 2652 - DNA, 21 bp, Artificial Sequence
  Description of Artificial Sequence: Target Sequence/siNA antisense region (stab22)
  misc_feature (21)..(21): 3'-3 attached terminal deoxyabasic moiety, inverted abasic, inverted nucleotide or other terminal cap that is optionally present
  misc_feature (20)..(20): Phosphorothioate or Phosphorodithioate 3'-Internucleotide Linkage (optionally present)
  misc_feature (1)..(19): ribonucleotide unmodified or modified as described for this sequence
cggccuugucaauggagcutt

SEQ ID NO: 2653 - DNA, 21 bp, Artificial Sequence
  Description of Artificial Sequence: Target Sequence/siNA antisense region (stab25)
  misc_feature (4)..(7): 2'-deoxy-2'Fluoro
  misc_feature (8)..(8): 2'-O-methyl
  misc_feature (9)..(10): 2'-deoxy-2'Fluoro
  misc_feature (11)..(12): 2'-O-methyl
  misc_feature (13)..(13): 2'-deoxy-2'Fluoro
  misc_feature (14)..(17): 2'-O-methyl
  misc_feature (18)..(19): 2'-deoxy-2'Fluoro
  misc_feature (20)..(20): Phosphorothioate or Phosphorodithioate 3'-Internucleotide Linkage (optionally present)
  misc_feature (1)..(19): ribonucleotide unmodified or modified as described for this sequence
cggccuugucaauggagcutt

SEQ ID NO: 2654 - RNA, 21 nt, Artificial Sequence
  Description of Artificial Sequence: Target Sequence/siNA antisense region (stab35)
  misc_feature (4)..(7): 2'-deoxy-2'Fluoro
  misc_feature (8)..(8): 2'-O-methyl
  misc_feature (9)..(10): 2'-deoxy-2'Fluoro
  misc_feature (11)..(12): 2'-O-methyl
  misc_feature (13)..(13): 2'-deoxy-2'Fluoro
  misc_feature (14)..(17): 2'-O-methyl
  misc_feature (18)..(19): 2'-deoxy-2'Fluoro
  misc_feature (20)..(21): 2'-O-methyl
cggccuugucaauggagcuuu

SEQ ID NO: 2655 - RNA, 21 nt, Artificial Sequence
  Description of Artificial Sequence: Target Sequence/siNA antisense region (stab36)
  misc_feature (4)..(7): 2'-deoxy-2'Fluoro
  misc_feature (8)..(8): 2'-O-methyl
  misc_feature (9)..(10): 2'-deoxy-2'Fluoro
  misc_feature (11)..(12): 2'-O-methyl
  misc_feature (13)..(13): 2'-deoxy-2'Fluoro
  misc_feature (14)..(17): 2'-O-methyl
  misc_feature (18)..(19): 2'-deoxy-2'Fluoro
  misc_feature (20)..(21): 2'-O-methyl
cggccuugucaauggagcugc

SEQ ID NO: 2656 - RNA, 19 nt, Artificial Sequence
  Description of Artificial Sequence: Target Sequence/siNA sense region
gugcagcuguuccugugug

SEQ ID NO: 2657 - RNA, 19 nt, Artificial Sequence
  Description of Artificial Sequence: Target Sequence/siNA antisense region
cacacaggaacagcugcac

SEQ ID NO: 2658 - DNA, 21 bp, Artificial Sequence
  Description of Artificial Sequence: Target Sequence/siNA sense region (stab00)
  misc_feature (1)..(19): ribonucleotide unmodified or modified as described for this sequence
gugcagcuguuccugugugtt

SEQ ID NO: 2659 - DNA, 21 bp, Artificial Sequence
  Description of Artificial Sequence: Target Sequence/siNA antisense region (stab00as)
  misc_feature (1)..(19): ribonucleotide unmodified or modified as described for this sequence
cacacaggaacagcugcactt

SEQ ID NO: 2660 - DNA, 21 bp, Artificial Sequence
  Description of Artificial Sequence: Target Sequence/siNA sense region (stab04)
  misc_feature (1)..(1): 5'-3 attached terminal deoxyabasic moiety, inverted abasic, inverted nucleotide or other terminal cap that is optionally present
  misc_feature (21)..(21): 3'-3 attached terminal deoxyabasic moiety, inverted abasic, inverted nucleotide or other terminal cap that is optionally present
  misc_feature (2)..(2): 2'-deoxy-2'Fluoro
  misc_feature (4)..(4): 2'-deoxy-2'Fluoro
  misc_feature (7)..(8): 2'-deoxy-2'Fluoro
  misc_feature (10)..(14): 2'-deoxy-2'Fluoro
  misc_feature (16)..(16): 2'-deoxy-2'Fluoro
  misc_feature (18)..(18): 2'-deoxy-2'Fluoro
  misc_feature (1)..(19): ribonucleotide unmodified or modified as described for this sequence
gugcagcuguuccugugugtt

SEQ ID NO: 2661 - DNA, 21 bp, Artificial Sequence
  Description of Artificial Sequence: Target Sequence/siNA antisense region (stab05)
  misc_feature (1)..(1): 2'-deoxy-2'Fluoro
  misc_feature (3)..(3): 2'-deoxy-2'Fluoro
  misc_feature (5)..(5): 2'-deoxy-2'Fluoro
  misc_feature (11)..(11): 2'-deoxy-2'Fluoro
  misc_feature (14)..(15): 2'-deoxy-2'Fluoro
  misc_feature (17)..(17): 2'-deoxy-2'Fluoro
  misc_feature (19)..(19): 2'-deoxy-2'Fluoro
  misc_feature (20)..(20): Phosphorothioate or Phosphorodithioate 3'-Internucleotide Linkage (optionally present)
  misc_feature (1)..(19): ribonucleotide unmodified or modified as described for this sequence
cacacaggaacagcugcactt

SEQ ID NO: 2662 - DNA, 21 bp, Artificial Sequence
  Description of Artificial Sequence: Target Sequence/siNA sense region (stab07)
  misc_feature (1)..(1): 5'-3 attached terminal deoxyabasic moiety, inverted abasic, inverted nucleotide or other terminal cap that is optionally present
  misc_feature (21)..(21): 3'-3 attached terminal deoxyabasic moiety, inverted abasic, inverted nucleotide or other terminal cap that is optionally present
  misc_feature (2)..(2): 2'-deoxy-2'Fluoro
  misc_feature (4)..(4): 2'-deoxy-2'Fluoro
  misc_feature (7)..(8): 2'-deoxy-2'Fluoro
  misc_feature (10)..(14): 2'-deoxy-2'Fluoro
  misc_feature (16)..(16): 2'-deoxy-2'Fluoro
  misc_feature (18)..(18): 2'-deoxy-2'Fluoro
  misc_feature (1)..(19): ribonucleotide unmodified or modified as described for this sequence
gugcagcuguuccugugugtt

SEQ ID NO: 2663 - DNA, 21 bp, Artificial Sequence
  Description of Artificial Sequence: Target Sequence/siNA antisense region (stab08)
  misc_feature (1)..(1): 2'-deoxy-2'Fluoro
  misc_feature (2)..(2): 2'-O-methyl
  misc_feature (3)..(3): 2'-deoxy-2'Fluoro
  misc_feature (4)..(4): 2'-O-methyl
  misc_feature (5)..(5): 2'-deoxy-2'Fluoro
  misc_feature (6)..(10): 2'-O-methyl
  misc_feature (11)..(11): 2'-deoxy-2'Fluoro
  misc_feature (12)..(13): 2'-O-methyl
  misc_feature (14)..(15): 2'-deoxy-2'Fluoro
  misc_feature (16)..(16): 2'-O-methyl
  misc_feature (17)..(17): 2'-deoxy-2'Fluoro
  misc_feature (18)..(18): 2'-O-methyl
  misc_feature (19)..(19): 2'-deoxy-2'Fluoro
  misc_feature (20)..(20): Phosphorothioate or Phosphorodithioate 3'-Internucleotide Linkage (optionally present)
  misc_feature (1)..(19): ribonucleotide unmodified or modified as described for this sequence
cacacaggaacagcugcactt

SEQ ID NO: 2664 - DNA, 21 bp, Artificial Sequence
  Description of Artificial Sequence: Target Sequence/siNA sense region (stab09)
  misc_feature (1)..(1): 5'-3 attached terminal deoxyabasic moiety, inverted abasic, inverted nucleotide or other terminal cap that is optionally present
  misc_feature (21)..(21): 3'-3 attached terminal deoxyabasic moiety, inverted abasic, inverted nucleotide or other terminal cap that is optionally present
  misc_feature (1)..(19): ribonucleotide unmodified or modified as described for this sequence
gugcagcuguuccugugugtt

SEQ ID NO: 2665 - DNA, 21 bp, Artificial Sequence
  Description of Artificial Sequence: Target Sequence/siNA antisense region (stab10)
  misc_feature (20)..(20): Phosphorothioate or Phosphorodithioate 3'-Internucleotide Linkage (optionally present)
  misc_feature (1)..(19): ribonucleotide unmodified or modified as described for this sequence
cacacaggaacagcugcactt

SEQ ID NO: 2666 - DNA, 21 bp, Artificial Sequence
  Description of Artificial Sequence: Target Sequence/siNA antisense region (stab19)
  misc_feature (21)..(21): 3'-3 attached terminal deoxyabasic moiety, inverted abasic, inverted nucleotide or other terminal cap that is optionally present
  misc_feature (1)..(1): 2'-deoxy-2'Fluoro
  misc_feature (2)..(2): 2'-O-methyl
  misc_feature (3)..(3): 2'-deoxy-2'Fluoro
  misc_feature (4)..(4): 2'-O-methyl
  misc_feature (5)..(5): 2'-deoxy-2'Fluoro
  misc_feature (6)..(10): 2'-O-methyl
  misc_feature (11)..(11): 2'-deoxy-2'Fluoro
  misc_feature (12)..(13): 2'-O-methyl
  misc_feature (14)..(15): 2'-deoxy-2'Fluoro
  misc_feature (16)..(16): 2'-O-methyl
  misc_feature (17)..(17): 2'-deoxy-2'Fluoro
  misc_feature (18)..(18): 2'-O-methyl
  misc_feature (19)..(19): 2'-deoxy-2'Fluoro
  misc_feature (1)..(19): ribonucleotide unmodified or modified as described for this sequence
cacacaggaacagcugcactt

SEQ ID NO: 2667 - DNA, 21 bp, Artificial Sequence
  Description of Artificial Sequence: Target Sequence/siNA antisense region (stab22)
  misc_feature (21)..(21): 3'-3 attached terminal deoxyabasic moiety, inverted abasic, inverted nucleotide or other terminal cap that is optionally present
  misc_feature (20)..(20): Phosphorothioate or Phosphorodithioate 3'-Internucleotide Linkage (optionally present)
  misc_feature (1)..(19): ribonucleotide unmodified or modified as described for this sequence
cacacaggaacagcugcactt

SEQ ID NO: 2668 - DNA, 21 bp, Artificial Sequence
  Description of Artificial Sequence: Target Sequence/siNA antisense region (stab25)
  misc_feature (4)..(4): 2'-O-methyl
  misc_feature (5)..(5): 2'-deoxy-2'Fluoro
  misc_feature (6)..(10): 2'-O-methyl
  misc_feature (11)..(11): 2'-deoxy-2'Fluoro
  misc_feature (12)..(13): 2'-O-methyl
  misc_feature (14)..(15): 2'-deoxy-2'Fluoro
  misc_feature (16)..(16): 2'-O-methyl
  misc_feature (17)..(17): 2'-deoxy-2'Fluoro
  misc_feature (18)..(18): 2'-O-methyl
  misc_feature (19)..(19): 2'-deoxy-2'Fluoro
  misc_feature (20)..(20): Phosphorothioate or Phosphorodithioate 3'-Internucleotide Linkage (optionally present)
  misc_feature (1)..(19): ribonucleotide unmodified or modified as described for this sequence
cacacaggaacagcugcactt

SEQ ID NO: 2669 - RNA, 21 nt, Artificial Sequence
  Description of Artificial Sequence: Target Sequence/siNA antisense region (stab35)
  misc_feature (4)..(4): 2'-O-methyl
  misc_feature (5)..(5): 2'-deoxy-2'Fluoro
  misc_feature (6)..(10): 2'-O-methyl
  misc_feature (11)..(11): 2'-deoxy-2'Fluoro
  misc_feature (12)..(13): 2'-O-methyl
  misc_feature (14)..(15): 2'-deoxy-2'Fluoro
  misc_feature (16)..(16): 2'-O-methyl
  misc_feature (17)..(17): 2'-deoxy-2'Fluoro
  misc_feature (18)..(18): 2'-O-methyl
  misc_feature (19)..(19): 2'-deoxy-2'Fluoro
  misc_feature (20)..(21): 2'-O-methyl
cacacaggaacagcugcacuu

SEQ ID NO: 2670 - RNA, 21 nt, Artificial Sequence
  Description of Artificial Sequence: Target Sequence/siNA antisense region (stab36)
  misc_feature (4)..(4): 2'-O-methyl
  misc_feature (5)..(5): 2'-deoxy-2'Fluoro
  misc_feature (6)..(10): 2'-O-methyl
  misc_feature (11)..(11): 2'-deoxy-2'Fluoro
  misc_feature (12)..(13): 2'-O-methyl
  misc_feature (14)..(15): 2'-deoxy-2'Fluoro
  misc_feature (16)..(16): 2'-O-methyl
  misc_feature (17)..(17): 2'-deoxy-2'Fluoro
  misc_feature (18)..(18): 2'-O-methyl
  misc_feature (19)..(19): 2'-deoxy-2'Fluoro
  misc_feature (20)..(21): 2'-O-methyl
cacacaggaacagcugcacgg

SEQ ID NO: 2671 - RNA, 19 nt, Artificial Sequence
  Description of Artificial Sequence: Target Sequence/siNA sense region
gaccugcuucuuguggugc

SEQ ID NO: 2672 - RNA, 19 nt, Artificial Sequence
  Description of Artificial Sequence: Target Sequence/siNA antisense region
gcaccacaagaagcagguc

SEQ ID NO: 2673 - DNA, 21 bp, Artificial Sequence
  Description of Artificial Sequence: Target Sequence/siNA sense region (stab00)
  misc_feature (1)..(19): ribonucleotide unmodified or modified as described for this sequence
gaccugcuucuuguggugctt

SEQ ID NO: 2674 - DNA, 21 bp, Artificial Sequence
  Description of Artificial Sequence: Target Sequence/siNA antisense region (stab00as)
  misc_feature (1)..(19): ribonucleotide unmodified or modified as described for this sequence
gcaccacaagaagcagguctt

SEQ ID NO: 2675 - DNA, 21 bp, Artificial Sequence
  Description of Artificial Sequence: Target Sequence/siNA sense region (stab04)
  misc_feature (1)..(1): 5'-3 attached terminal deoxyabasic moiety, inverted abasic, inverted nucleotide or other terminal cap that is optionally present
  misc_feature (21)..(21): 3'-3 attached terminal deoxyabasic moiety, inverted abasic, inverted nucleotide or other terminal cap that is optionally present
  misc_feature (3)..(5): 2'-deoxy-2'Fluoro
  misc_feature (7)..(12): 2'-deoxy-2'Fluoro
  misc_feature (14)..(14): 2'-deoxy-2'Fluoro
  misc_feature (17)..(17): 2'-deoxy-2'Fluoro
  misc_feature (19)..(19): 2'-deoxy-2'Fluoro
  misc_feature (1)..(19): ribonucleotide unmodified or modified as described for this sequence
gaccugcuucuuguggugctt

SEQ ID NO: 2676 - DNA, 21 bp, Artificial Sequence
  Description of Artificial Sequence: Target Sequence/siNA antisense region (stab05)
  misc_feature (2)..(2): 2'-deoxy-2'Fluoro
  misc_feature (4)..(5): 2'-deoxy-2'Fluoro
  misc_feature (7)..(7): 2'-deoxy-2'Fluoro
  misc_feature (14)..(14): 2'-deoxy-2'Fluoro
  misc_feature (18)..(19): 2'-deoxy-2'Fluoro
  misc_feature (20)..(20): Phosphorothioate or Phosphorodithioate 3'-Internucleotide Linkage (optionally present)
  misc_feature (1)..(19): ribonucleotide unmodified or modified as described for this sequence
gcaccacaagaagcagguctt

SEQ ID NO: 2677 - DNA, 21 bp, Artificial Sequence
  Description of Artificial Sequence: Target Sequence/siNA sense region (stab07)
  misc_feature (1)..(1): 5'-3 attached terminal deoxyabasic moiety, inverted abasic, inverted nucleotide or other terminal cap that is optionally present
  misc_feature (21)..(21): 3'-3 attached terminal deoxyabasic moiety, inverted abasic, inverted nucleotide or other terminal cap that is optionally present
  misc_feature (3)..(5): 2'-deoxy-2'Fluoro
  misc_feature (7)..(12): 2'-deoxy-2'Fluoro
  misc_feature (14)..(14): 2'-deoxy-2'Fluoro
  misc_feature (17)..(17): 2'-deoxy-2'Fluoro
  misc_feature (19)..(19): 2'-deoxy-2'Fluoro
  misc_feature (1)..(19): ribonucleotide unmodified or modified as described for this sequence
gaccugcuucuuguggugctt

SEQ ID NO: 2678 - DNA, 21 bp, Artificial Sequence
  Description of Artificial Sequence: Target Sequence/siNA antisense region (stab08)
  misc_feature (1)..(1): 2'-O-methyl
  misc_feature (2)..(2): 2'-deoxy-2'Fluoro
  misc_feature (3)..(3): 2'-O-methyl
  misc_feature (4)..(5): 2'-deoxy-2'Fluoro
  misc_feature (6)..(6): 2'-O-methyl
  misc_feature (7)..(7): 2'-deoxy-2'Fluoro
  misc_feature (8)..(13): 2'-O-methyl
  misc_feature (14)..(14): 2'-deoxy-2'Fluoro
  misc_feature (15)..(17): 2'-O-methyl
  misc_feature (18)..(19): 2'-deoxy-2'Fluoro
  misc_feature (20)..(20): Phosphorothioate or Phosphorodithioate 3'-Internucleotide Linkage (optionally present)
  misc_feature (1)..(19): ribonucleotide unmodified or modified as described for this sequence
gcaccacaagaagcagguctt

SEQ ID NO: 2679 - DNA, 21 bp, Artificial Sequence
  Description of Artificial Sequence: Target Sequence/siNA sense region (stab09)
  misc_feature (1)..(1): 5'-3 attached terminal deoxyabasic moiety, inverted abasic, inverted nucleotide or other terminal cap that is optionally present
  misc_feature (21)..(21): 3'-3 attached terminal deoxyabasic moiety, inverted abasic, inverted nucleotide or other terminal cap that is optionally present
  misc_feature (1)..(19): ribonucleotide unmodified or modified as described for this sequence
gaccugcuucuuguggugctt

SEQ ID NO: 2680 - DNA, 21 bp, Artificial Sequence
  Description of Artificial Sequence: Target Sequence/siNA antisense region (stab10)
  misc_feature (20)..(20): Phosphorothioate or Phosphorodithioate 3'-Internucleotide Linkage (optionally present)
  misc_feature (1)..(19): ribonucleotide unmodified or modified as described for this sequence
gcaccacaagaagcagguctt

SEQ ID NO: 2681 - DNA, 21 bp, Artificial Sequence
  Description of Artificial Sequence: Target Sequence/siNA antisense region (stab19)
  misc_feature (21)..(21): 3'-3 attached terminal deoxyabasic moiety, inverted abasic, inverted nucleotide or other terminal cap that is optionally present
  misc_feature (1)..(1): 2'-O-methyl
  misc_feature (2)..(2): 2'-deoxy-2'Fluoro
  misc_feature (3)..(3): 2'-O-methyl
  misc_feature (4)..(5): 2'-deoxy-2'Fluoro
  misc_feature (6)..(6): 2'-O-methyl
  misc_feature (7)..(7): 2'-deoxy-2'Fluoro
  misc_feature (8)..(13): 2'-O-methyl
  misc_feature (14)..(14): 2'-deoxy-2'Fluoro
  misc_feature (15)..(17): 2'-O-methyl
  misc_feature (18)..(19): 2'-deoxy-2'Fluoro
  misc_feature (1)..(19): ribonucleotide unmodified or modified as described for this sequence
gcaccacaagaagcagguctt

SEQ ID NO: 2682 - DNA, 21 bp, Artificial Sequence
  Description of Artificial Sequence: Target Sequence/siNA antisense region (stab22)
  misc_feature (21)..(21): 3'-3 attached terminal deoxyabasic moiety, inverted abasic, inverted nucleotide or other terminal cap that is optionally present
  misc_feature (20)..(20): Phosphorothioate or Phosphorodithioate 3'-Internucleotide Linkage (optionally present)
  misc_feature (1)..(19): ribonucleotide unmodified or modified as described for this sequence
gcaccacaagaagcagguctt

SEQ ID NO: 2683 - DNA, 21 bp, Artificial Sequence
  Description of Artificial Sequence: Target Sequence/siNA antisense region (stab25)
  misc_feature (4)..(5): 2'-deoxy-2'Fluoro
  misc_feature (6)..(6): 2'-O-methyl
  misc_feature (7)..(7): 2'-deoxy-2'Fluoro
  misc_feature (8)..(13): 2'-O-methyl
  misc_feature (14)..(14): 2'-deoxy-2'Fluoro
  misc_feature (15)..(17): 2'-O-methyl
  misc_feature (18)..(19): 2'-deoxy-2'Fluoro
  misc_feature (20)..(20): Phosphorothioate or Phosphorodithioate 3'-Internucleotide Linkage (optionally present)
  misc_feature (1)..(19): ribonucleotide unmodified or modified as described for this sequence
gcaccacaagaagcagguctt

SEQ ID NO: 2684 - RNA, 21 nt, Artificial Sequence
  Description of Artificial Sequence: Target Sequence/siNA antisense region (stab35)
  misc_feature (4)..(5): 2'-deoxy-2'Fluoro
  misc_feature (6)..(6): 2'-O-methyl
  misc_feature (7)..(7): 2'-deoxy-2'Fluoro
  misc_feature (8)..(13): 2'-O-methyl
  misc_feature (14)..(14): 2'-deoxy-2'Fluoro
  misc_feature (15)..(17): 2'-O-methyl
  misc_feature (18)..(19): 2'-deoxy-2'Fluoro
  misc_feature (20)..(21): 2'-O-methyl
gcaccacaagaagcaggucuu

SEQ ID NO: 2685 - RNA, 21 nt, Artificial Sequence
  Description of Artificial Sequence: Target Sequence/siNA antisense region (stab36)
  misc_feature (4)..(5): 2'-deoxy-2'Fluoro
  misc_feature (6)..(6): 2'-O-methyl
  misc_feature (7)..(7): 2'-deoxy-2'Fluoro
  misc_feature (8)..(13): 2'-O-methyl
  misc_feature (14)..(14): 2'-deoxy-2'Fluoro
  misc_feature (15)..(17): 2'-O-methyl
  misc_feature (18)..(19): 2'-deoxy-2'Fluoro
  misc_feature (20)..(21): 2'-O-methyl
gcaccacaagaagcaggucac

SEQ ID NO: 2686 - RNA, 19 nt, Artificial Sequence
  Description of Artificial Sequence: Target Sequence/siNA sense region
cgcaccagccuguggcggc

SEQ ID NO: 2687 - RNA, 19 nt, Artificial Sequence
  Description of Artificial Sequence: Target Sequence/siNA antisense region
gccgccacaggcuggugcg

SEQ ID NO: 2688 - DNA, 21 bp, Artificial Sequence
  Description of Artificial Sequence: Target Sequence/siNA sense region (stab00)
  misc_feature (1)..(19): ribonucleotide unmodified or modified as described for this sequence
cgcaccagccuguggcggctt

SEQ ID NO: 2689 - DNA, 21 bp, Artificial Sequence
  Description of Artificial Sequence: Target Sequence/siNA antisense region (stab00as)
  misc_feature (1)..(19): ribonucleotide unmodified or modified as described for this sequence
gccgccacaggcuggugcgtt

SEQ ID NO: 2690 - DNA, 21 bp, Artificial Sequence
  Description of Artificial Sequence: Target Sequence/siNA sense region (stab04)
  misc_feature (1)..(1): 5'-3 attached terminal deoxyabasic moiety, inverted abasic, inverted nucleotide or other terminal cap that is optionally present
  misc_feature (21)..(21): 3'-3 attached terminal deoxyabasic moiety, inverted abasic, inverted nucleotide or other terminal cap that is optionally present
  misc_feature (1)..(1): 2'-deoxy-2'Fluoro
  misc_feature (3)..(3): 2'-deoxy-2'Fluoro
  misc_feature (5)..(6): 2'-deoxy-2'Fluoro
  misc_feature (9)..(11): 2'-deoxy-2'Fluoro
  misc_feature (13)..(13): 2'-deoxy-2'Fluoro
  misc_feature (16)..(16): 2'-deoxy-2'Fluoro
  misc_feature (19)..(19): 2'-deoxy-2'Fluoro
  misc_feature (1)..(19): ribonucleotide unmodified or modified as described for this sequence
cgcaccagccuguggcggctt

SEQ ID NO: 2691 - DNA, 21 bp, Artificial Sequence
  Description of Artificial Sequence: Target Sequence/siNA antisense region (stab05)
  misc_feature (2)..(3): 2'-deoxy-2'Fluoro
  misc_feature (5)..(6): 2'-deoxy-2'Fluoro
  misc_feature (8)..(8): 2'-deoxy-2'Fluoro
  misc_feature (12)..(13): 2'-deoxy-2'Fluoro
  misc_feature (16)..(16): 2'-deoxy-2'Fluoro
  misc_feature (18)..(18): 2'-deoxy-2'Fluoro
  misc_feature (20)..(20): Phosphorothioate or Phosphorodithioate 3'-Internucleotide Linkage (optionally present)
  misc_feature (1)..(19): ribonucleotide unmodified or modified as described for this sequence
gccgccacaggcuggugcgtt

SEQ ID NO: 2692 - DNA, 21 bp, Artificial Sequence
  Description of Artificial Sequence: Target Sequence/siNA sense region (stab07)
  misc_feature (1)..(1): 5'-3 attached terminal deoxyabasic moiety, inverted abasic, inverted nucleotide or other terminal cap that is optionally present
  misc_feature (21)..(21): 3'-3 attached terminal deoxyabasic moiety, inverted abasic, inverted nucleotide or other terminal cap that is optionally present
  misc_feature (1)..(1): 2'-deoxy-2'Fluoro
  misc_feature (3)..(3): 2'-deoxy-2'Fluoro
  misc_feature (5)..(6): 2'-deoxy-2'Fluoro
  misc_feature (9)..(11): 2'-deoxy-2'Fluoro
  misc_feature (13)..(13): 2'-deoxy-2'Fluoro
  misc_feature (16)..(16): 2'-deoxy-2'Fluoro
  misc_feature (19)..(19): 2'-deoxy-2'Fluoro
  misc_feature (1). .(19): ribonucleotide unmodified or modified as described for this sequence
cgcaccagccuguggcggctt

SEQ ID NO: 2693 - DNA, 21 bp, Artificial Sequence
  Description of Artificial Sequence: Target Sequence/siNA antisense region (stab08)
  misc_feature (1)..(1): 2'-O-methyl
  misc_feature (2)..(3): 2'-deoxy-2'Fluoro
  misc_feature (4)..(4): 2'-O-methyl
  misc_feature (5)..(6): 2'-deoxy-2'Fluoro
  misc_feature (7)..(7): 2'-O-methyl
  misc_feature (8)..(8): 2'-deoxy-2'Fluoro
  misc_feature (9)..(11): 2'-O-methyl
  misc_feature (12)..(13): 2'-deoxy-2'Fluoro
  misc_feature (14)..(15): 2'-O-methyl
  misc_feature (16)..(16): 2'-deoxy-2'Fluoro
  misc_feature (17)..(17): 2'-O-methyl
  misc_feature (18)..(18): 2'-deoxy-2'Fluoro
  misc_feature (19)..(19): 2'-O-methyl
  misc_feature (20)..(20): Phosphorothioate or Phosphorodithioate 3'-Internucleotide Linkage (optionally present)
  misc_feature (1). .(19): ribonucleotide unmodified or modified as described for this sequence
gccgccacaggcuggugcgtt

SEQ ID NO: 2694 - DNA, 21 bp, Artificial Sequence
  Description of Artificial Sequence: Target Sequence/siNA sense region (stab09)
  misc_feature (1)..(1): 5'-3 attached terminal deoxyabasic moiety, inverted abasic, inverted nucleotide or other terminal cap that is optionally present
  misc_feature (21)..(21): 3'-3 attached terminal deoxyabasic moiety, inverted abasic, inverted nucleotide or other terminal cap that is optionally present
  misc_feature (1). .(19): ribonucleotide unmodified or modified as described for this sequence
cgcaccagccuguggcggctt

SEQ ID NO: 2695 - DNA, 21 bp, Artificial Sequence
  Description of Artificial Sequence: Target Sequence/siNA antisense region (stab10)
  misc_feature (20)..(20): Phosphorothioate or Phosphorodithioate 3'-Internucleotide Linkage (optionally present)
  misc_feature (1). .(19): ribonucleotide unmodified or modified as described for this sequence
gccgccacaggcuggugcgtt

SEQ ID NO: 2696 - DNA, 21 bp, Artificial Sequence
  Description of Artificial Sequence: Target Sequence/siNA antisense region (stab19)
  misc_feature (21)..(21): 3'-3 attached terminal deoxyabasic moiety, inverted abasic, inverted nucleotide or other terminal cap that is optionally present
  misc_feature (1)..(1): 2'-O-methyl
  misc_feature (2)..(3): 2'-deoxy-2'Fluoro
  misc_feature (4)..(4): 2'-O-methyl
  misc_feature (5)..(6): 2'-deoxy-2'Fluoro
  misc_feature (7)..(7): 2'-O-methyl
  misc_feature (8)..(8): 2'-deoxy-2'Fluoro
  misc_feature (9)..(11): 2'-O-methyl
  misc_feature (12)..(13): 2'-deoxy-2'Fluoro
  misc_feature (14)..(15): 2'-O-methyl
  misc_feature (16)..(16): 2'-deoxy-2'Fluoro
  misc_feature (17)..(17): 2'-O-methyl
  misc_feature (18)..(18): 2'-deoxy-2'Fluoro
  misc_feature (19)..(19): 2'-O-methyl
  misc_feature (1). .(19): ribonucleotide unmodified or modified as described for this sequence
gccgccacaggcuggugcgtt

SEQ ID NO: 2697 - DNA, 21 bp, Artificial Sequence
  Description of Artificial Sequence: Target Sequence/siNA antisense region (stab22)
  misc_feature (21)..(21): 3'-3 attached terminal deoxyabasic moiety, inverted abasic, inverted nucleotide or other terminal cap that is optionally present
  misc_feature (20)..(20): Phosphorothioate or Phosphorodithioate 3'-Internucleotide Linkage (optionally present)
  misc_feature (1). .(19): ribonucleotide unmodified or modified as described for this sequence
gccgccacaggcuggugcgtt

SEQ ID NO: 2698 - DNA, 21 bp, Artificial Sequence
  Description of Artificial Sequence: Target Sequence/siNA antisense region (stab25)
  misc_feature (4)..(4): 2'-O-methyl
  misc_feature (5)..(6): 2'-deoxy-2'Fluoro
  misc_feature (7)..(7): 2'-O-methyl
  misc_feature (8)..(8): 2'-deoxy-2'Fluoro
  misc_feature (9)..(11): 2'-O-methyl
  misc_feature (12)..(13): 2'-deoxy-2'Fluoro
  misc_feature (14)..(15): 2'-O-methyl
  misc_feature (16)..(16): 2'-deoxy-2'Fluoro
  misc_feature (17)..(17): 2'-O-methyl
  misc_feature (18)..(18): 2'-deoxy-2'Fluoro
  misc_feature (19)..(19): 2'-O-methyl
  misc_feature (20)..(20): Phosphorothioate or Phosphorodithioate 3'-Internucleotide Linkage (optionally present)
  misc_feature (1)..(19): ribonucleotide unmodified or modified as described for this sequence
gccgccacaggcuggugcgtt

SEQ ID NO: 2699 - RNA, 21 nt, Artificial Sequence
  Description of Artificial Sequence: Target Sequence/siNA antisense region (stab35)
  misc_feature (4)..(4): 2'-O-methyl
  misc_feature (5)..(6): 2'-deoxy-2'Fluoro
  misc_feature (7)..(7): 2'-O-methyl
  misc_feature (8)..(8): 2'-deoxy-2'Fluoro
  misc_feature (9)..(11): 2'-O-methyl
  misc_feature (12)..(13): 2'-deoxy-2'Fluoro
  misc_feature (14)..(15): 2'-O-methyl
  misc_feature (16)..(16): 2'-deoxy-2'Fluoro
  misc_feature (17)..(17): 2'-O-methyl
  misc_feature (18)..(18): 2'-deoxy-2'Fluoro
  misc_feature (19)..(21): 2'-O-methyl
gccgccacaggcuggugcguu

SEQ ID NO: 2700 - RNA, 21 nt, Artificial Sequence
  Description of Artificial Sequence: Target Sequence/siNA antisense region (stab36)
  misc_feature (4)..(4): 2'-O-methyl
  misc_feature (5)..(6): 2'-deoxy-2'Fluoro
  misc_feature (7)..(7): 2'-O-methyl
  misc_feature (8)..(8): 2'-deoxy-2'Fluoro
  misc_feature (9)..(11): 2'-O-methyl
  misc_feature (12)..(13): 2'-deoxy-2'Fluoro
  misc_feature (14)..(15): 2'-O-methyl
  misc_feature (16)..(16): 2'-deoxy-2'Fluoro
  misc_feature (17)..(17): 2'-O-methyl
  misc_feature (18)..(18): 2'-deoxy-2'Fluoro
  misc_feature (19)..(21): 2'-O-methyl
gccgccacaggcuggugcgca

SEQ ID NO: 2701 - RNA, 19 nt, Artificial Sequence
  Description of Artificial Sequence: Target Sequence/siNA sense region
cagcagcagcccccggccc

SEQ ID NO: 2702 - RNA, 19 nt, Artificial Sequence
  Description of Artificial Sequence: Target Sequence/siNA antisense region
gggccgggggcugcugcug

SEQ ID NO: 2703 - DNA, 21 bp, Artificial Sequence
  Description of Artificial Sequence: Target Sequence/siNA sense region (stab00)
  misc_feature (1). .(19): ribonucleotide unmodified or modified as described for this sequence
cagcagcagcccccggccctt

SEQ ID NO: 2704 - DNA, 21 bp, Artificial Sequence
  Description of Artificial Sequence: Target Sequence/siNA antisense region (stab00as)
  misc_feature (1). .(19): ribonucleotide unmodified or modified as described for this sequence
gggccgggggcugcugcugtt

SEQ ID NO: 2705 - DNA, 21 bp, Artificial Sequence
  Description of Artificial Sequence: Target Sequence/siNA sense region (stab04)
  misc_feature (1)..(1): 5'-3 attached terminal deoxyabasic moiety, inverted abasic, inverted nucleotide or other terminal cap that is optionally present
  misc_feature (21)..(21): 3'-3 attached terminal deoxyabasic moiety, inverted abasic, inverted nucleotide or other terminal cap that is optionally present
  misc_feature (1)..(1): 2'-deoxy-2'Fluoro
  misc_feature (4)..(4): 2'-deoxy-2'Fluoro
  misc_feature (7)..(7): 2'-deoxy-2'Fluoro
  misc_feature (10)..(14): 2'-deoxy-2'Fluoro
  misc_feature (17)..(19): 2'-deoxy-2'Fluoro
  misc_feature (1)..(19): ribonucleotide unmodified or modified as described for this sequence
cagcagcagcccccggccctt

SEQ ID NO: 2706 - DNA, 21 bp, Artificial Sequence
  Description of Artificial Sequence: Target Sequence/siNA antisense region (stab05)
  misc_feature (4)..(5): 2'-deoxy-2'Fluoro
  misc_feature (11)..(12): 2'-deoxy-2'Fluoro
  misc_feature (14)..(15): 2'-deoxy-2'Fluoro
  misc_feature (17)..(18): 2'-deoxy-2'Fluoro
  misc_feature (20)..(20): Phosphorothioate or Phosphorodithioate 3'-Internucleotide Linkage (optionally present)
  misc_feature (1)..(19): ribonucleotide unmodified or modified as described for this sequence
gggccgggggcugcugcugtt

SEQ ID NO: 2707 - DNA, 21 bp, Artificial Sequence
  Description of Artificial Sequence: Target Sequence/siNA sense region (stab07)
  misc_feature (1)..(1): 5'-3 attached terminal deoxyabasic moiety, inverted abasic, inverted nucleotide or other terminal cap that is optionally present
  misc_feature (21)..(21): 3'-3 attached terminal deoxyabasic moiety, inverted abasic, inverted nucleotide or other terminal cap that is optionally present
  misc_feature (1)..(1): 2'-deoxy-2'Fluoro
  misc_feature (4)..(4): 2'-deoxy-2'Fluoro
  misc_feature (7)..(7): 2'-deoxy-2'Fluoro
  misc_feature (10)..(14): 2'-deoxy-2'Fluoro
  misc_feature (17)..(19): 2'-deoxy-2'Fluoro
  misc_feature (1). .(19): ribonucleotide unmodified or modified as described for this sequence
cagcagcagcccccggccctt

SEQ ID NO: 2708 - DNA, 21 bp, Artificial Sequence
  Description of Artificial Sequence: Target Sequence/siNA antisense region (stab08)
  misc_feature (1)..(3): 2'-O-methyl
  misc_feature (4)..(5): 2'-deoxy-2'Fluoro
  misc_feature (6)..(10): 2'-O-methyl
  misc_feature (11)..(12): 2'-deoxy-2'Fluoro
  misc_feature (13)..(13): 2'-O-methyl
  misc_feature (14)..(15): 2'-deoxy-2'Fluoro
  misc_feature (16)..(16): 2'-O-methyl
  misc_feature (17)..(18): 2'-deoxy-2'Fluoro
  misc_feature (19)..(19): 2'-O-methyl
  misc_feature (20)..(20): Phosphorothioate or Phosphorodithioate 3'-Internucleotide Linkage (optionally present)
  misc_feature (1). .(19): ribonucleotide unmodified or modified as described for this sequence
gggccgggggcugcugcugtt

SEQ ID NO: 2709 - DNA, 21 bp, Artificial Sequence
  Description of Artificial Sequence: Target Sequence/siNA sense region (stab09)
  misc_feature (1)..(1): 5'-3 attached terminal deoxyabasic moiety, inverted abasic, inverted nucleotide or other terminal cap that is optionally present
  misc_feature (21)..(21): 3'-3 attached terminal deoxyabasic moiety, inverted abasic, inverted nucleotide or other terminal cap that is optionally present
  misc_feature (1). .(19): ribonucleotide unmodified or modified as described for this sequence
cagcagcagcccccggccctt

SEQ ID NO: 2710 - DNA, 21 bp, Artificial Sequence
  Description of Artificial Sequence: Target Sequence/siNA antisense region (stab10)
  misc_feature (20)..(20): Phosphorothioate or Phosphorodithioate 3'-Internucleotide Linkage (optionally present)
  misc_feature (1). .(19): ribonucleotide unmodified or modified as described for this sequence
gggccgggggcugcugcugtt

SEQ ID NO: 2711 - DNA, 21 bp, Artificial Sequence
  Description of Artificial Sequence: Target Sequence/siNA antisense region (stab19)
  misc_feature (21)..(21): 3'-3 attached terminal deoxyabasic moiety, inverted abasic, inverted nucleotide or other terminal cap that is optionally present
  misc_feature (1)..(3): 2'-O-methyl
  misc_feature (4)..(5): 2'-deoxy-2'Fluoro
  misc_feature (6)..(10): 2'-O-methyl
  misc_feature (11)..(12): 2'-deoxy-2'Fluoro
  misc_feature (13)..(13): 2'-O-methyl
  misc_feature (14)..(15): 2'-deoxy-2'Fluoro
  misc_feature (16)..(16): 2'-O-methyl
  misc_feature (17)..(18): 2'-deoxy-2'Fluoro
  misc_feature (19)..(19): 2'-O-methyl
  misc_feature (1). .(19): ribonucleotide unmodified or modified as described for this sequence
gggccgggggcugcugcugtt

SEQ ID NO: 2712 - DNA, 21 bp, Artificial Sequence
  Description of Artificial Sequence: Target Sequence/siNA antisense region (stab22)
  misc_feature (21)..(21): 3'-3 attached terminal deoxyabasic moiety, inverted abasic, inverted nucleotide or other terminal cap that is optionally present
  misc_feature (20)..(20): Phosphorothioate or Phosphorodithioate 3'-Internucleotide Linkage (optionally present)
  misc_feature (1). .(19): ribonucleotide unmodified or modified as described for this sequence
gggccgggggcugcugcugtt

SEQ ID NO: 2713 - DNA, 21 bp, Artificial Sequence
  Description of Artificial Sequence: Target Sequence/siNA antisense region (stab25)
  misc_feature (4)..(5): 2'-deoxy-2'Fluoro
  misc_feature (6)..(10): 2'-O-methyl
  misc_feature (11)..(12): 2'-deoxy-2'Fluoro
  misc_feature (13)..(13): 2'-O-methyl
  misc_feature (14)..(15): 2'-deoxy-2'Fluoro
  misc_feature (16)..(16): 2'-O-methyl
  misc_feature (17)..(18): 2'-deoxy-2'Fluoro
  misc_feature (19)..(19): 2'-O-methyl
  misc_feature (20)..(20): Phosphorothioate or Phosphorodithioate 3'-Internucleotide Linkage (optionally present)
  misc_feature (1)..(19): ribonucleotide unmodified or modified as described for this sequence
gggccgggggcugcugcugtt

SEQ ID NO: 2714 - RNA, 21 nt, Artificial Sequence
  Description of Artificial Sequence: Target Sequence/siNA antisense region (stab35)
  misc_feature (4)..(5): 2'-deoxy-2'Fluoro
  misc_feature (6)..(10): 2'-O-methyl
  misc_feature (11)..(12): 2'-deoxy-2'Fluoro
  misc_feature (13)..(13): 2'-O-methyl
  misc_feature (14)..(15): 2'-deoxy-2'Fluoro
  misc_feature (16)..(16): 2'-O-methyl
  misc_feature (17)..(18): 2'-deoxy-2'Fluoro
  misc_feature (19)..(21): 2'-O-methyl
gggccgggggcugcugcuguu

SEQ ID NO: 2715 - RNA, 21 nt, Artificial Sequence
  Description of Artificial Sequence: Target Sequence/siNA antisense region (stab36)
  misc_feature (4)..(5): 2'-deoxy-2'Fluoro
  misc_feature (6)..(10): 2'-O-methyl
  misc_feature (11)..(12): 2'-deoxy-2'Fluoro
  misc_feature (13)..(13): 2'-O-methyl
  misc_feature (14)..(15): 2'-deoxy-2'Fluoro
  misc_feature (16)..(16): 2'-O-methyl
  misc_feature (17)..(18): 2'-deoxy-2'Fluoro
  misc_feature (19)..(21): 2'-O-methyl
gggccgggggcugcugcugcc

SEQ ID NO: 2716 - RNA, 19 nt, Artificial Sequence
  Description of Artificial Sequence: Target Sequence/siNA sense region
ccggccccagcagcccagg

SEQ ID NO: 2717 - RNA, 19 nt, Artificial Sequence
  Description of Artificial Sequence: Target Sequence/siNA antisense region
ccugggcugcuggggccgg

SEQ ID NO: 2718 - DNA, 21 bp, Artificial Sequence
  Description of Artificial Sequence: Target Sequence/siNA sense region (stab00)
  misc_feature (1). .(19): ribonucleotide unmodified or modified as described for this sequence
ccggccccagcagcccaggtt

SEQ ID NO: 2719 - DNA, 21 bp, Artificial Sequence
  Description of Artificial Sequence: Target Sequence/siNA antisense region (stab00as)
  misc_feature (1). .(19): ribonucleotide unmodified or modified as described for this sequence
ccugggcugcuggggccggtt

SEQ ID NO: 2720 - DNA, 21 bp, Artificial Sequence
  Description of Artificial Sequence: Target Sequence/siNA sense region (stab04)
  misc_feature (1)..(1): 5'-3 attached terminal deoxyabasic moiety, inverted abasic, inverted nucleotide or other terminal cap that is optionally present
  misc_feature (21)..(21): 3'-3 attached terminal deoxyabasic moiety, inverted abasic, inverted nucleotide or other terminal cap that is optionally present
  misc_feature (1)..(2): 2'-deoxy-2'Fluoro
  misc_feature (5)..(8): 2'-deoxy-2'Fluoro
  misc_feature (11)..(11): 2'-deoxy-2'Fluoro
  misc_feature (14)..(16): 2'-deoxy-2'Fluoro
  misc_feature (1)..(19): ribonucleotide unmodified or modified as described for this sequence
ccggccccagcagcccaggtt

SEQ ID NO: 2721 - DNA, 21 bp, Artificial Sequence
  Description of Artificial Sequence: Target Sequence/siNA antisense region (stab05)
  misc_feature (1)..(3): 2'-deoxy-2'Fluoro
  misc_feature (7)..(8): 2'-deoxy-2'Fluoro
  misc_feature (10)..(11): 2'-deoxy-2'Fluoro
  misc_feature (16)..(17): 2'-deoxy-2'Fluoro
  misc_feature (20)..(20): Phosphorothioate or Phosphorodithioate 3'-Internucleotide Linkage (optionally present)
  misc_feature (1)..(19): ribonucleotide unmodified or modified as described for this sequence
ccugggcugcuggggccggtt

SEQ ID NO: 2722 - DNA, 21 bp, Artificial Sequence
  Description of Artificial Sequence: Target Sequence/siNA sense region (stab07)
  misc_feature (1)..(1): 5'-3 attached terminal deoxyabasic moiety, inverted abasic, inverted nucleotide or other terminal cap that is optionally present
  misc_feature (21)..(21): 3'-3 attached terminal deoxyabasic moiety, inverted abasic, inverted nucleotide or other terminal cap that is optionally present
  misc_feature (1)..(2): 2'-deoxy-2'Fluoro
  misc_feature (5)..(8): 2'-deoxy-2'Fluoro
  misc_feature (11)..(11): 2'-deoxy-2'Fluoro
  misc_feature (14)..(16): 2'-deoxy-2'Fluoro
  misc_feature (1). .(19): ribonucleotide unmodified or modified as described for this sequence
ccggccccagcagcccaggtt

SEQ ID NO: 2723 - DNA, 21 bp, Artificial Sequence
  Description of Artificial Sequence: Target Sequence/siNA antisense region (stab08)
  misc_feature (1)..(3): 2'-deoxy-2'Fluoro
  misc_feature (4)..(6): 2'-O-methyl
  misc_feature (7)..(8): 2'-deoxy-2'Fluoro
  misc_feature (9)..(9): 2'-O-methyl
  misc_feature (10)..(11): 2'-deoxy-2'Fluoro
  misc_feature (12)..(15): 2'-O-methyl
  misc_feature (16)..(17): 2'-deoxy-2'Fluoro
  misc_feature (18)..(19): 2'-O-methyl
  misc_feature (20)..(20): Phosphorothioate or Phosphorodithioate 3'-Internucleotide Linkage (optionally present)
  misc_feature (1). .(19): ribonucleotide unmodified or modified as described for this sequence
ccugggcugcuggggccggtt

SEQ ID NO: 2724 - DNA, 21 bp, Artificial Sequence
  Description of Artificial Sequence: Target Sequence/siNA sense region (stab09)
  misc_feature (1)..(1): 5'-3 attached terminal deoxyabasic moiety, inverted abasic, inverted nucleotide or other terminal cap that is optionally present
  misc_feature (21)..(21): 3'-3 attached terminal deoxyabasic moiety, inverted abasic, inverted nucleotide or other terminal cap that is optionally present
  misc_feature (1). .(19): ribonucleotide unmodified or modified as described for this sequence
ccggccccagcagcccaggtt

SEQ ID NO: 2725 - DNA, 21 bp, Artificial Sequence
  Description of Artificial Sequence: Target Sequence/siNA antisense region (stab10)
  misc_feature (20)..(20): Phosphorothioate or Phosphorodithioate 3'-Internucleotide Linkage (optionally present)
  misc_feature (1). .(19): ribonucleotide unmodified or modified as described for this sequence
ccugggcugcuggggccggtt

SEQ ID NO: 2726 - DNA, 21 bp, Artificial Sequence
  Description of Artificial Sequence: Target Sequence/siNA antisense region (stab19)
  misc_feature (21)..(21): 3'-3 attached terminal deoxyabasic moiety, inverted abasic, inverted nucleotide or other terminal cap that is optionally present
  misc_feature (1)..(3): 2'-deoxy-2'Fluoro
  misc_feature (4)..(6): 2'-O-methyl
  misc_feature (7)..(8): 2'-deoxy-2'Fluoro
  misc_feature (9)..(9): 2'-O-methyl
  misc_feature (10)..(11): 2'-deoxy-2'Fluoro
  misc_feature (12)..(15): 2'-O-methyl
  misc_feature (16)..(17): 2'-deoxy-2'Fluoro
  misc_feature (18)..(19): 2'-O-methyl
  misc_feature (1). .(19): ribonucleotide unmodified or modified as described for this sequence
ccugggcugcuggggccggtt

SEQ ID NO: 2727 - DNA, 21 bp, Artificial Sequence
  Description of Artificial Sequence: Target Sequence/siNA antisense region (stab22)
  misc_feature (21)..(21): 3'-3 attached terminal deoxyabasic moiety, inverted abasic, inverted nucleotide or other terminal cap that is optionally present
  misc_feature (20)..(20): Phosphorothioate or Phosphorodithioate 3'-Internucleotide Linkage (optionally present)
  misc_feature (1). .(19): ribonucleotide unmodified or modified as described for this sequence
ccugggcugcuggggccggtt

SEQ ID NO: 2728 - DNA, 21 bp, Artificial Sequence
  Description of Artificial Sequence: Target Sequence/siNA antisense region (stab25)
  misc_feature (4)..(6): 2'-O-methyl
  misc_feature (7)..(8): 2'-deoxy-2'Fluoro
  misc_feature (9)..(9): 2'-O-methyl
  misc_feature (10)..(11): 2'-deoxy-2'Fluoro
  misc_feature (12)..(15): 2'-O-methyl
  misc_feature (16)..(17): 2'-deoxy-2'Fluoro
  misc_feature (18)..(19): 2'-O-methyl
  misc_feature (20)..(20): Phosphorothioate or Phosphorodithioate 3'-Internucleotide Linkage (optionally present)
  misc_feature (1)..(19): ribonucleotide unmodified or modified as described for this sequence
ccugggcugcuggggccggtt

SEQ ID NO: 2729 - RNA, 21 nt, Artificial Sequence
  Description of Artificial Sequence: Target Sequence/siNA antisense region (stab35)
  misc_feature (4)..(6): 2'-O-methyl
  misc_feature (7)..(8): 2'-deoxy-2'Fluoro
  misc_feature (9)..(9): 2'-O-methyl
  misc_feature (10)..(11): 2'-deoxy-2'Fluoro
  misc_feature (12)..(15): 2'-O-methyl
  misc_feature (16)..(17): 2'-deoxy-2'Fluoro
  misc_feature (18)..(21): 2'-O-methyl
ccugggcugcuggggccgguu

SEQ ID NO: 2730 - RNA, 21 nt, Artificial Sequence
  Description of Artificial Sequence: Target Sequence/siNA antisense region (stab36)
  misc_feature (4)..(6): 2'-O-methyl
  misc_feature (7)..(8): 2'-deoxy-2'Fluoro
  misc_feature (9)..(9): 2'-O-methyl
  misc_feature (10)..(11): 2'-deoxy-2'Fluoro
  misc_feature (12)..(15): 2'-O-methyl
  misc_feature (16)..(17): 2'-deoxy-2'Fluoro
  misc_feature (18)..(21): 2'-O-methyl
ccugggcugcuggggccgggg

SEQ ID NO: 2731 - RNA, 19 nt, Artificial Sequence
  Description of Artificial Sequence: Target Sequence/siNA sense region
ggcaccagcagcaggcccc

SEQ ID NO: 2732 - RNA, 19 nt, Artificial Sequence
  Description of Artificial Sequence: Target Sequence/siNA antisense region
ggggccugcugcuggugcc

SEQ ID NO: 2733 - DNA, 21 bp, Artificial Sequence
  Description of Artificial Sequence: Target Sequence/siNA sense region (stab00)
  misc_feature (1). .(19): ribonucleotide unmodified or modified as described for this sequence
ggcaccagcagcaggcccctt

SEQ ID NO: 2734 - DNA, 21 bp, Artificial Sequence
  Description of Artificial Sequence: Target Sequence/siNA antisense region (stab00as)
  misc_feature (1). .(19): ribonucleotide unmodified or modified as described for this sequence
ggggccugcugcuggugcctt

SEQ ID NO: 2735 - DNA, 21 bp, Artificial Sequence
  Description of Artificial Sequence: Target Sequence/siNA sense region (stab04)
  misc_feature (1)..(1): 5'-3 attached terminal deoxyabasic moiety, inverted abasic, inverted nucleotide or other terminal cap that is optionally present
  misc_feature (21)..(21): 3'-3 attached terminal deoxyabasic moiety, inverted abasic, inverted nucleotide or other terminal cap that is optionally present
  misc_feature (3)..(3): 2'-deoxy-2'Fluoro
  misc_feature (5)..(6): 2'-deoxy-2'Fluoro
  misc_feature (9)..(9): 2'-deoxy-2'Fluoro
  misc_feature (12)..(12): 2'-deoxy-2'Fluoro
  misc_feature (16)..(19): 2'-deoxy-2'Fluoro
  misc_feature (1)..(19): ribonucleotide unmodified or modified as described for this sequence
ggcaccagcagcaggcccctt

SEQ ID NO: 2736 - DNA, 21 bp, Artificial Sequence
  Description of Artificial Sequence: Target Sequence/siNA antisense region (stab05)
  misc_feature (5)..(7): 2'-deoxy-2'Fluoro
  misc_feature (9)..(10): 2'-deoxy-2'Fluoro
  misc_feature (12)..(13): 2'-deoxy-2'Fluoro
  misc_feature (16)..(16): 2'-deoxy-2'Fluoro
  misc_feature (18)..(19): 2'-deoxy-2'Fluoro
  misc_feature (20)..(20): Phosphorothioate or Phosphorodithioate 3'-Internucleotide Linkage (optionally present)
  misc_feature (1)..(19): ribonucleotide unmodified or modified as described for this sequence
ggggccugcugcuggugcctt

SEQ ID NO: 2737 - DNA, 21 bp, Artificial Sequence
  Description of Artificial Sequence: Target Sequence/siNA sense region (stab07)
  misc_feature (1)..(1): 5'-3 attached terminal deoxyabasic moiety, inverted abasic, inverted nucleotide or other terminal cap that is optionally present
  misc_feature (21)..(21): 3'-3 attached terminal deoxyabasic moiety, inverted abasic, inverted nucleotide or other terminal cap that is optionally present
  misc_feature (3)..(3): 2'-deoxy-2'Fluoro
  misc_feature (5)..(6): 2'-deoxy-2'Fluoro
  misc_feature (9)..(9): 2'-deoxy-2'Fluoro
  misc_feature (12)..(12): 2'-deoxy-2'Fluoro
  misc_feature (16)..(19): 2'-deoxy-2'Fluoro
  misc_feature (1). .(19): ribonucleotide unmodified or modified as described for this sequence
ggcaccagcagcaggcccctt

SEQ ID NO: 2738 - DNA, 21 bp, Artificial Sequence
  Description of Artificial Sequence: Target Sequence/siNA antisense region (stab08)
  misc_feature (1)..(4): 2'-O-methyl
  misc_feature (5)..(7): 2'-deoxy-2'Fluoro
  misc_feature (8)..(8): 2'-O-methyl
  misc_feature (9)..(10): 2'-deoxy-2'Fluoro
  misc_feature (11)..(11): 2'-O-methyl
  misc_feature (12)..(13): 2'-deoxy-2'Fluoro
  misc_feature (14)..(15): 2'-O-methyl
  misc_feature (16)..(16): 2'-deoxy-2'Fluoro
  misc_feature (17)..(17): 2'-O-methyl
  misc_feature (18)..(19): 2'-deoxy-2'Fluoro
  misc_feature (20)..(20): Phosphorothioate or Phosphorodithioate 3'-Internucleotide Linkage (optionally present)
  misc_feature (1). .(19): ribonucleotide unmodified or modified as described for this sequence
ggggccugcugcuggugcctt

SEQ ID NO: 2739 - DNA, 21 bp, Artificial Sequence
  Description of Artificial Sequence: Target Sequence/siNA sense region (stab09)
  misc_feature (1)..(1): 5'-3 attached terminal deoxyabasic moiety, inverted abasic, inverted nucleotide or other terminal cap that is optionally present
  misc_feature (21)..(21): 3'-3 attached terminal deoxyabasic moiety, inverted abasic, inverted nucleotide or other terminal cap that is optionally present
  misc_feature (1). .(19): ribonucleotide unmodified or modified as described for this sequence
ggcaccagcagcaggcccctt

SEQ ID NO: 2740 - DNA, 21 bp, Artificial Sequence
  Description of Artificial Sequence: Target Sequence/siNA antisense region (stab10)
  misc_feature (20)..(20): Phosphorothioate or Phosphorodithioate 3'-Internucleotide Linkage (optionally present)
  misc_feature (1). .(19): ribonucleotide unmodified or modified as described for this sequence
ggggccugcugcuggugcctt

SEQ ID NO: 2741 - DNA, 21 bp, Artificial Sequence
  Description of Artificial Sequence: Target Sequence/siNA antisense region (stab19)
  misc_feature (21)..(21): 3'-3 attached terminal deoxyabasic moiety, inverted abasic, inverted nucleotide or other terminal cap that is optionally present
  misc_feature (1)..(4): 2'-O-methyl
  misc_feature (5)..(7): 2'-deoxy-2'Fluoro
  misc_feature (8)..(8): 2'-O-methyl
  misc_feature (9)..(10): 2'-deoxy-2'Fluoro
  misc_feature (11)..(11): 2'-O-methyl
  misc_feature (12)..(13): 2'-deoxy-2'Fluoro
  misc_feature (14)..(15): 2'-O-methyl
  misc_feature (16)..(16): 2'-deoxy-2'Fluoro
  misc_feature (17)..(17): 2'-O-methyl
  misc_feature (18)..(19): 2'-deoxy-2'Fluoro
  misc_feature (1). .(19): ribonucleotide unmodified or modified as described for this sequence
ggggccugcugcuggugcctt

SEQ ID NO: 2742 - DNA, 21 bp, Artificial Sequence
  Description of Artificial Sequence: Target Sequence/siNA antisense region (stab22)
  misc_feature (21)..(21): 3'-3 attached terminal deoxyabasic moiety, inverted abasic, inverted nucleotide or other terminal cap that is optionally present
  misc_feature (20)..(20): Phosphorothioate or Phosphorodithioate 3'-Internucleotide Linkage (optionally present)
  misc_feature (1). .(19): ribonucleotide unmodified or modified as described for this sequence
ggggccugcugcuggugcctt

SEQ ID NO: 2743 - DNA, 21 bp, Artificial Sequence
  Description of Artificial Sequence: Target Sequence/siNA antisense region (stab25)
  misc_feature (4)..(4): 2'-O-methyl
  misc_feature (5)..(7): 2'-deoxy-2'Fluoro
  misc_feature (8)..(8): 2'-O-methyl
  misc_feature (9)..(10): 2'-deoxy-2'Fluoro
  misc_feature (11)..(11): 2'-O-methyl
  misc_feature (12)..(13): 2'-deoxy-2'Fluoro
  misc_feature (14)..(15): 2'-O-methyl
  misc_feature (16)..(16): 2'-deoxy-2'Fluoro
  misc_feature (17)..(17): 2'-O-methyl
  misc_feature (18)..(19): 2'-deoxy-2'Fluoro
  misc_feature (20)..(20): Phosphorothioate or Phosphorodithioate 3'-Internucleotide Linkage (optionally present)
  misc_feature (1)..(19): ribonucleotide unmodified or modified as described for this sequence
ggggccugcugcuggugcctt

SEQ ID NO: 2744 - RNA, 21 nt, Artificial Sequence
  Description of Artificial Sequence: Target Sequence/siNA antisense region (stab35)
  misc_feature (4)..(4): 2'-O-methyl
  misc_feature (5)..(7): 2'-deoxy-2'Fluoro
  misc_feature (8)..(8): 2'-O-methyl
  misc_feature (9)..(10): 2'-deoxy-2'Fluoro
  misc_feature (11)..(11): 2'-O-methyl
  misc_feature (12)..(13): 2'-deoxy-2'Fluoro
  misc_feature (14)..(15): 2'-O-methyl
  misc_feature (16)..(16): 2'-deoxy-2'Fluoro
  misc_feature (17)..(17): 2'-O-methyl
  misc_feature (18)..(19): 2'-deoxy-2'Fluoro
  misc_feature (20)..(21): 2'-O-methyl
ggggccugcugcuggugccuu

SEQ ID NO: 2745 - RNA, 21 nt, Artificial Sequence
  Description of Artificial Sequence: Target Sequence/siNA antisense region (stab36)
  misc_feature (4)..(4): 2'-O-methyl
  misc_feature (5)..(7): 2'-deoxy-2'Fluoro
  misc_feature (8)..(8): 2'-O-methyl
  misc_feature (9)..(10): 2'-deoxy-2'Fluoro
  misc_feature (11)..(11): 2'-O-methyl
  misc_feature (12)..(13): 2'-deoxy-2'Fluoro
  misc_feature (14)..(15): 2'-O-methyl
  misc_feature (16)..(16): 2'-deoxy-2'Fluoro
  misc_feature (17)..(17): 2'-O-methyl
  misc_feature (18)..(19): 2'-deoxy-2'Fluoro
  misc_feature (20)..(21): 2'-O-methyl
ggggccugcugcuggugcccu

SEQ ID NO: 2746 - RNA, 19 nt, Artificial Sequence
  Description of Artificial Sequence: Target Sequence/siNA sense region
caggcuuccgcccuugagc

SEQ ID NO: 2747 - RNA, 19 nt, Artificial Sequence
  Description of Artificial Sequence: Target Sequence/siNA antisense region
gcucaagggcggaagccug

SEQ ID NO: 2748 - DNA, 21 bp, Artificial Sequence
  Description of Artificial Sequence: Target Sequence/siNA sense region (stab00)
  misc_feature (1). .(19): ribonucleotide unmodified or modified as described for this sequence
caggcuuccgcccuugagctt

SEQ ID NO: 2749 - DNA, 21 bp, Artificial Sequence
  Description of Artificial Sequence: Target Sequence/siNA antisense region (stab00as)
  misc_feature (1). .(19): ribonucleotide unmodified or modified as described for this sequence
gcucaagggcggaagccugtt

SEQ ID NO: 2750 - DNA, 21 bp, Artificial Sequence
  Description of Artificial Sequence: Target Sequence/siNA sense region (stab04)
  misc_feature (1)..(1): 5'-3 attached terminal deoxyabasic moiety, inverted abasic, inverted nucleotide or other terminal cap that is optionally present
  misc_feature (21)..(21): 3'-3 attached terminal deoxyabasic moiety, inverted abasic, inverted nucleotide or other terminal cap that is optionally present
  misc_feature (1)..(1): 2'-deoxy-2'Fluoro
  misc_feature (5)..(9): 2'-deoxy-2'Fluoro
  misc_feature (11)..(15): 2'-deoxy-2'Fluoro
  misc_feature (19)..(19): 2'-deoxy-2'Fluoro
  misc_feature (1)..(19): ribonucleotide unmodified or modified as described for this sequence
caggcuuccgcccuugagctt

SEQ ID NO: 2751 - DNA, 21 bp, Artificial Sequence
  Description of Artificial Sequence: Target Sequence/siNA antisense region (stab05)
  misc_feature (2)..(4): 2'-deoxy-2'Fluoro
  misc_feature (10)..(10): 2'-deoxy-2'Fluoro
  misc_feature (16)..(18): 2'-deoxy-2'Fluoro
  misc_feature (20)..(20): Phosphorothioate or Phosphorodithioate 3'-Internucleotide Linkage (optionally present)
  misc_feature (1)..(19): ribonucleotide unmodified or modified as described for this sequence
gcucaagggcggaagccugtt

SEQ ID NO: 2752 - DNA, 21 bp, Artificial Sequence
  Description of Artificial Sequence: Target Sequence/siNA sense region (stab07)
  misc_feature (1)..(1): 5'-3 attached terminal deoxyabasic moiety, inverted abasic, inverted nucleotide or other terminal cap that is optionally present
  misc_feature (21)..(21): 3'-3 attached terminal deoxyabasic moiety, inverted abasic, inverted nucleotide or other terminal cap that is optionally present
  misc_feature (1)..(1): 2'-deoxy-2'Fluoro
  misc_feature (5)..(9): 2'-deoxy-2'Fluoro
  misc_feature (11)..(15): 2'-deoxy-2'Fluoro
  misc_feature (19)..(19): 2'-deoxy-2'Fluoro
  misc_feature (1). .(19): ribonucleotide unmodified or modified as described for this sequence
caggcuuccgcccuugagctt

SEQ ID NO: 2753 - DNA, 21 bp, Artificial Sequence
  Description of Artificial Sequence: Target Sequence/siNA antisense region (stab08)
  misc_feature (1)..(1): 2'-O-methyl
  misc_feature (2)..(4): 2'-deoxy-2'Fluoro
  misc_feature (5)..(9): 2'-O-methyl
  misc_feature (10)..(10): 2'-deoxy-2'Fluoro
  misc_feature (11)..(15): 2'-O-methyl
  misc_feature (16)..(18): 2'-deoxy-2'Fluoro
  misc_feature (19)..(19): 2'-O-methyl
  misc_feature (20)..(20): Phosphorothioate or Phosphorodithioate 3'-Internucleotide Linkage (optionally present)
  misc_feature (1). .(19): ribonucleotide unmodified or modified as described for this sequence
gcucaagggcggaagccugtt

SEQ ID NO: 2754 - DNA, 21 bp, Artificial Sequence
  Description of Artificial Sequence: Target Sequence/siNA sense region (stab09)
  misc_feature (1)..(1): 5'-3 attached terminal deoxyabasic moiety, inverted abasic, inverted nucleotide or other terminal cap that is optionally present
  misc_feature (21)..(21): 3'-3 attached terminal deoxyabasic moiety, inverted abasic, inverted nucleotide or other terminal cap that is optionally present
  misc_feature (1). .(19): ribonucleotide unmodified or modified as described for this sequence
caggcuuccgcccuugagctt

SEQ ID NO: 2755 - DNA, 21 bp, Artificial Sequence
  Description of Artificial Sequence: Target Sequence/siNA antisense region (stab10)
  misc_feature (20)..(20): Phosphorothioate or Phosphorodithioate 3'-Internucleotide Linkage (optionally present)
  misc_feature (1). .(19): ribonucleotide unmodified or modified as described for this sequence
gcucaagggcggaagccugtt

SEQ ID NO: 2756 - DNA, 21 bp, Artificial Sequence
  Description of Artificial Sequence: Target Sequence/siNA antisense region (stab19)
  misc_feature (21)..(21): 3'-3 attached terminal deoxyabasic moiety, inverted abasic, inverted nucleotide or other terminal cap that is optionally present
  misc_feature (1)..(1): 2'-O-methyl
  misc_feature (2)..(4): 2'-deoxy-2'Fluoro
  misc_feature (5)..(9): 2'-O-methyl
  misc_feature (10)..(10): 2'-deoxy-2'Fluoro
  misc_feature (11)..(15): 2'-O-methyl
  misc_feature (16)..(18): 2'-deoxy-2'Fluoro
  misc_feature (19)..(19): 2'-O-methyl
  misc_feature (1). .(19): ribonucleotide unmodified or modified as described for this sequence
gcucaagggcggaagccugtt

SEQ ID NO: 2757 - DNA, 21 bp, Artificial Sequence
  Description of Artificial Sequence: Target Sequence/siNA antisense region (stab22)
  misc_feature (21)..(21): 3'-3 attached terminal deoxyabasic moiety, inverted abasic, inverted nucleotide or other terminal cap that is optionally present
  misc_feature (20)..(20): Phosphorothioate or Phosphorodithioate 3'-Internucleotide Linkage (optionally present)
  misc_feature (1). .(19): ribonucleotide unmodified or modified as described for this sequence
gcucaagggcggaagccugtt

SEQ ID NO: 2758 - DNA, 21 bp, Artificial Sequence
  Description of Artificial Sequence: Target Sequence/siNA antisense region (stab25)
  misc_feature (4)..(4): 2'-deoxy-2'Fluoro
  misc_feature (5)..(9): 2'-O-methyl
  misc_feature (10)..(10): 2'-deoxy-2'Fluoro
  misc_feature (11)..(15): 2'-O-methyl
  misc_feature (16)..(18): 2'-deoxy-2'Fluoro
  misc_feature (19)..(19): 2'-O-methyl
  misc_feature (20)..(20): Phosphorothioate or Phosphorodithioate 3'-Internucleotide Linkage (optionally present)
  misc_feature (1)..(19): ribonucleotide unmodified or modified as described for this sequence
gcucaagggcggaagccugtt

SEQ ID NO: 2759 - RNA, 21 nt, Artificial Sequence
  Description of Artificial Sequence: Target Sequence/siNA antisense region (stab35)
  misc_feature (4)..(4): 2'-deoxy-2'Fluoro
  misc_feature (5)..(9): 2'-O-methyl
  misc_feature (10)..(10): 2'-deoxy-2'Fluoro
  misc_feature (11)..(15): 2'-O-methyl
  misc_feature (16)..(18): 2'-deoxy-2'Fluoro
  misc_feature (19)..(21): 2'-O-methyl
gcucaagggcggaagccuguu

SEQ ID NO: 2760 - RNA, 21 nt, Artificial Sequence
  Description of Artificial Sequence: Target Sequence/siNA antisense region (stab36)
  misc_feature (4)..(4): 2'-deoxy-2'Fluoro
  misc_feature (5)..(9): 2'-O-methyl
  misc_feature (10)..(10): 2'-deoxy-2'Fluoro
  misc_feature (11)..(15): 2'-O-methyl
  misc_feature (16)..(18): 2'-deoxy-2'Fluoro
  misc_feature (19)..(21): 2'-O-methyl
gcucaagggcggaagccuggg

SEQ ID NO: 2761 - RNA, 19 nt, Artificial Sequence
  Description of Artificial Sequence: Target Sequence/siNA sense region
cugcguggcuuccaacggg

SEQ ID NO: 2762 - RNA, 19 nt, Artificial Sequence
  Description of Artificial Sequence: Target Sequence/siNA antisense region
cccguuggaagccacgcag

SEQ ID NO: 2763 - DNA, 21 bp, Artificial Sequence
  Description of Artificial Sequence: Target Sequence/siNA sense region (stab00)
cugcguggcuuccaacgggtt

SEQ ID NO: 2764 - DNA, 21 bp, Artificial Sequence
  Description of Artificial Sequence: Target Sequence/siNA antisense region (stab00as)
  misc_feature (1). .(19): ribonucleotide unmodified or modified as described for this sequence
cccguuggaagccacgcagtt

SEQ ID NO: 2765 - DNA, 21 bp, Artificial Sequence
  Description of Artificial Sequence: Target Sequence/siNA sense region (stab04)
  misc_feature (1)..(1): 5'-3 attached terminal deoxyabasic moiety, inverted abasic, inverted nucleotide or other terminal cap that is optionally present
  misc_feature (21)..(21): 3'-3 attached terminal deoxyabasic moiety, inverted abasic, inverted nucleotide or other terminal cap that is optionally present
  misc_feature (1)..(2): 2'-deoxy-2'Fluoro
  misc_feature (4)..(4): 2'-deoxy-2'Fluoro
  misc_feature (6)..(6): 2'-deoxy-2'Fluoro
  misc_feature (9)..(13): 2'-deoxy-2'Fluoro
  misc_feature (16)..(16): 2'-deoxy-2'Fluoro
  misc_feature (1)..(19): ribonucleotide unmodified or modified as described for this sequence
cugcguggcuuccaacgggtt

SEQ ID NO: 2766 - DNA, 21 bp, Artificial Sequence
  Description of Artificial Sequence: Target Sequence/siNA antisense region (stab05)
  misc_feature (1)..(3): 2'-deoxy-2'Fluoro
  misc_feature (5)..(6): 2'-deoxy-2'Fluoro
  misc_feature (12)..(13): 2'-deoxy-2'Fluoro
  misc_feature (15)..(15): 2'-deoxy-2'Fluoro
  misc_feature (17)..(17): 2'-deoxy-2'Fluoro
  misc_feature (20)..(20): Phosphorothioate or Phosphorodithioate 3'-Internucleotide Linkage (optionally present)
  misc_feature (1)..(19): ribonucleotide unmodified or modified as described for this sequence
cccguuggaagccacgcagtt

SEQ ID NO: 2767 - DNA, 21 bp, Artificial Sequence
  Description of Artificial Sequence: Target Sequence/siNA sense region (stab07)
  misc_feature (1)..(1): 5'-3 attached terminal deoxyabasic moiety, inverted abasic, inverted nucleotide or other terminal cap that is optionally present
  misc_feature (21)..(21): 3'-3 attached terminal deoxyabasic moiety, inverted abasic, inverted nucleotide or other terminal cap that is optionally present
  misc_feature (1)..(2): 2'-deoxy-2'Fluoro
  misc_feature (4)..(4): 2'-deoxy-2'Fluoro
  misc_feature (6)..(6): 2'-deoxy-2'Fluoro
  misc_feature (9)..(13): 2'-deoxy-2'Fluoro
  misc_feature (16)..(16): 2'-deoxy-2'Fluoro
  misc_feature (1). .(19): ribonucleotide unmodified or modified as described for this sequence
cugcguggcuuccaacgggtt

SEQ ID NO: 2768 - DNA, 21 bp, Artificial Sequence
  Description of Artificial Sequence: Target Sequence/siNA antisense region (stab08)
  misc_feature (1)..(3): 2'-deoxy-2'Fluoro
  misc_feature (4)..(4): 2'-O-methyl
  misc_feature (5)..(6): 2'-deoxy-2'Fluoro
  misc_feature (7)..(11): 2'-O-methyl
  misc_feature (12)..(13): 2'-deoxy-2'Fluoro
  misc_feature (14)..(14): 2'-O-methyl
  misc_feature (15)..(15): 2'-deoxy-2'Fluoro
  misc_feature (16)..(16): 2'-O-methyl
  misc_feature (17)..(17): 2'-deoxy-2'Fluoro
  misc_feature (18)..(19): 2'-O-methyl
  misc_feature (20)..(20): Phosphorothioate or Phosphorodithioate 3'-Internucleotide Linkage (optionally present)
  misc_feature (1). .(19): ribonucleotide unmodified or modified as described for this sequence
cccguuggaagccacgcagtt

SEQ ID NO: 2769 - DNA, 21 bp, Artificial Sequence
  Description of Artificial Sequence: Target Sequence/siNA sense region (stab09)
  misc_feature (1)..(1): 5'-3 attached terminal deoxyabasic moiety, inverted abasic, inverted nucleotide or other terminal cap that is optionally present
  misc_feature (21)..(21): 3'-3 attached terminal deoxyabasic moiety, inverted abasic, inverted nucleotide or other terminal cap that is optionally present
  misc_feature (1). .(19): ribonucleotide unmodified or modified as described for this sequence
cugcguggcuuccaacgggtt

SEQ ID NO: 2770 - DNA, 21 bp, Artificial Sequence
  Description of Artificial Sequence: Target Sequence/siNA antisense region (stab10)
  misc_feature (20)..(20): Phosphorothioate or Phosphorodithioate 3'-Internucleotide Linkage (optionally present)
  misc_feature (1). .(19): ribonucleotide unmodified or modified as described for this sequence
cccguuggaagccacgcagtt

SEQ ID NO: 2771 - DNA, 21 bp, Artificial Sequence
  Description of Artificial Sequence: Target Sequence/siNA antisense region (stab19)
  misc_feature (21)..(21): 3'-3 attached terminal deoxyabasic moiety, inverted abasic, inverted nucleotide or other terminal cap that is optionally present
  misc_feature (1)..(3): 2'-deoxy-2'Fluoro
  misc_feature (4)..(4): 2'-O-methyl
  misc_feature (5)..(6): 2'-deoxy-2'Fluoro
  misc_feature (7)..(11): 2'-O-methyl
  misc_feature (12)..(13): 2'-deoxy-2'Fluoro
  misc_feature (14)..(14): 2'-O-methyl
  misc_feature (15)..(15): 2'-deoxy-2'Fluoro
  misc_feature (16)..(16): 2'-O-methyl
  misc_feature (17)..(17): 2'-deoxy-2'Fluoro
  misc_feature (18)..(19): 2'-O-methyl
  misc_feature (1). .(19): ribonucleotide unmodified or modified as described for this sequence
cccguuggaagccacgcagtt

SEQ ID NO: 2772 - DNA, 21 bp, Artificial Sequence
  Description of Artificial Sequence: Target Sequence/siNA antisense region (stab22)
  misc_feature (21)..(21): 3'-3 attached terminal deoxyabasic moiety, inverted abasic, inverted nucleotide or other terminal cap that is optionally present
  misc_feature (20)..(20): Phosphorothioate or Phosphorodithioate 3'-Internucleotide Linkage (optionally present)
  misc_feature (1). .(19): ribonucleotide unmodified or modified as described for this sequence
cccguuggaagccacgcagtt

SEQ ID NO: 2773 - DNA, 21 bp, Artificial Sequence
  Description of Artificial Sequence: Target Sequence/siNA antisense region (stab25)
  misc_feature (4)..(4): 2'-O-methyl
  misc_feature (5)..(6): 2'-deoxy-2'Fluoro
  misc_feature (7)..(11): 2'-O-methyl
  misc_feature (12)..(13): 2'-deoxy-2'Fluoro
  misc_feature (14)..(14): 2'-O-methyl
  misc_feature (15)..(15): 2'-deoxy-2'Fluoro
  misc_feature (16)..(16): 2'-O-methyl
  misc_feature (17)..(17): 2'-deoxy-2'Fluoro
  misc_feature (18)..(19): 2'-O-methyl
  misc_feature (20)..(20): Phosphorothioate or Phosphorodithioate 3'-Internucleotide Linkage (optionally present)
  misc_feature (1)..(19): ribonucleotide unmodified or modified as described for this sequence
cccguuggaagccacgcagtt

SEQ ID NO: 2774 - RNA, 21 nt, Artificial Sequence
  Description of Artificial Sequence: Target Sequence/siNA antisense region (stab35)
  misc_feature (4)..(4): 2'-O-methyl
  misc_feature (5)..(6): 2'-deoxy-2'Fluoro
  misc_feature (7)..(11): 2'-O-methyl
  misc_feature (12)..(13): 2'-deoxy-2'Fluoro
  misc_feature (14)..(14): 2'-O-methyl
  misc_feature (15)..(15): 2'-deoxy-2'Fluoro
  misc_feature (16)..(16): 2'-O-methyl
  misc_feature (17)..(17): 2'-deoxy-2'Fluoro
  misc_feature (18)..(21): 2'-O-methyl
cccguuggaagccacgcaguu

SEQ ID NO: 2775 - RNA, 21 nt, Artificial Sequence
  Description of Artificial Sequence: Target Sequence/siNA antisense region (stab36)
  misc_feature (4)..(4): 2'-O-methyl
  misc_feature (5)..(6): 2'-deoxy-2'Fluoro
  misc_feature (7)..(11): 2'-O-methyl
  misc_feature (12)..(13): 2'-deoxy-2'Fluoro
  misc_feature (14)..(14): 2'-O-methyl
  misc_feature (15)..(15): 2'-deoxy-2'Fluoro
  misc_feature (16)..(16): 2'-O-methyl
  misc_feature (17)..(17): 2'-deoxy-2'Fluoro
  misc_feature (18)..(21): 2'-O-methyl
cccguuggaagccacgcagcu

SEQ ID NO: 2776 - RNA, 19 nt, Artificial Sequence
  Description of Artificial Sequence: Target Sequence/siNA sense region
gaccugagcagccugaggc

SEQ ID NO: 2777 - RNA, 19 nt, Artificial Sequence
  Description of Artificial Sequence: Target Sequence/siNA antisense region
gccucaggcugcucagguc

SEQ ID NO: 2778 - DNA, 21 bp, Artificial Sequence
  Description of Artificial Sequence: Target Sequence/siNA sense region (stab00)
  misc_feature (1). .(19): ribonucleotide unmodified or modified as described for this sequence
gaccugagcagccugaggctt

SEQ ID NO: 2779 - DNA, 21 bp, Artificial Sequence
  Description of Artificial Sequence: Target Sequence/siNA antisense region (stab00as)
  misc_feature (1)..(19): ribonucleotide unmodified or modified as described for this sequence
gccucaggcugcucagguctt

SEQ ID NO: 2780 - DNA, 21 bp, Artificial Sequence
  Description of Artificial Sequence: Target Sequence/siNA sense region (stab04)
  misc_feature (1)..(1): 5'-3 attached terminal deoxyabasic moiety, inverted abasic, inverted nucleotide or other terminal cap that is optionally present
  misc_feature (21)..(21): 3'-3 attached terminal deoxyabasic moiety, inverted abasic, inverted nucleotide or other terminal cap that is optionally present
  misc_feature (3)..(5): 2'-deoxy-2'Fluoro
  misc_feature (9)..(9): 2'-deoxy-2'Fluoro
  misc_feature (12)..(14): 2'-deoxy-2'Fluoro
  misc_feature (19)..(19): 2'-deoxy-2'Fluoro
  misc_feature (1)..(19): ribonucleotide unmodified or modified as described for this sequence
gaccugagcagccugaggctt

SEQ ID NO: 2781 - DNA, 21 bp, Artificial Sequence
  Description of Artificial Sequence: Target Sequence/siNA antisense region (stab05)
  misc_feature (2)..(5): 2'-deoxy-2'Fluoro
  misc_feature (9)..(10): 2'-deoxy-2'Fluoro
  misc_feature (12)..(14): 2'-deoxy-2'Fluoro
  misc_feature (18)..(19): 2'-deoxy-2'Fluoro
  misc_feature (20)..(20): Phosphorothioate or Phosphorodithioate 3'-Internucleotide Linkage (optionally present)
  misc_feature (1)..(19): ribonucleotide unmodified or modified as described for this sequence
gccucaggcugcucagguctt

SEQ ID NO: 2782 - DNA, 21 bp, Artificial Sequence
  Description of Artificial Sequence: Target Sequence/siNA sense region (stab07)
  misc_feature (1)..(1): 5'-3 attached terminal deoxyabasic moiety, inverted abasic, inverted nucleotide or other terminal cap that is optionally present
  misc_feature (21)..(21): 3'-3 attached terminal deoxyabasic moiety, inverted abasic, inverted nucleotide or other terminal cap that is optionally present
  misc_feature (3)..(5): 2'-deoxy-2'Fluoro
  misc_feature (9)..(9): 2'-deoxy-2'Fluoro
  misc_feature (12)..(14): 2'-deoxy-2'Fluoro
  misc_feature (19)..(19): 2'-deoxy-2'Fluoro
  misc_feature (1). .(19): ribonucleotide unmodified or modified as described for this sequence
gaccugagcagccugaggctt

SEQ ID NO: 2783 - DNA, 21 bp, Artificial Sequence
  Description of Artificial Sequence: Target Sequence/siNA antisense region (stab08)
  misc_feature (1)..(1): 2'-O-methyl
  misc_feature (2)..(5): 2'-deoxy-2'Fluoro
  misc_feature (6)..(8): 2'-O-methyl
  misc_feature (9)..(10): 2'-deoxy-2'Fluoro
  misc_feature (11)..(11): 2'-O-methyl
  misc_feature (12)..(14): 2'-deoxy-2'Fluoro
  misc_feature (15)..(17): 2'-O-methyl
  misc_feature (18)..(19): 2'-deoxy-2'Fluoro
  misc_feature (20)..(20): Phosphorothioate or Phosphorodithioate 3'-Internucleotide Linkage (optionally present)
  misc_feature (1). .(19): ribonucleotide unmodified or modified as described for this sequence
gccucaggcugcucagguctt

SEQ ID NO: 2784 - DNA, 21 bp, Artificial Sequence
  Description of Artificial Sequence: Target Sequence/siNA sense region (stab09)
  misc_feature (1)..(1): 5'-3 attached terminal deoxyabasic moiety, inverted abasic, inverted nucleotide or other terminal cap that is optionally present
  misc_feature (21)..(21): 3'-3 attached terminal deoxyabasic moiety, inverted abasic, inverted nucleotide or other terminal cap that is optionally present
  misc_feature (1). .(19): ribonucleotide unmodified or modified as described for this sequence
gaccugagcagccugaggctt

SEQ ID NO: 2785 - DNA, 21 bp, Artificial Sequence
  Description of Artificial Sequence: Target Sequence/siNA antisense region (stab10)
  misc_feature (20)..(20): Phosphorothioate or Phosphorodithioate 3'-Internucleotide Linkage (optionally present)
  misc_feature (1). .(19): ribonucleotide unmodified or modified as described for this sequence
gccucaggcugcucagguctt

SEQ ID NO: 2786 - DNA, 21 bp, Artificial Sequence
  Description of Artificial Sequence: Target Sequence/siNA antisense region (stab19)
  misc_feature (21)..(21): 3'-3 attached terminal deoxyabasic moiety, inverted abasic, inverted nucleotide or other terminal cap that is optionally present
  misc_feature (1)..(1): 2'-O-methyl
  misc_feature (2)..(5): 2'-deoxy-2'Fluoro
  misc_feature (6)..(8): 2'-O-methyl
  misc_feature (9)..(10): 2'-deoxy-2'Fluoro
  misc_feature (11)..(11): 2'-O-methyl
  misc_feature (12)..(14): 2'-deoxy-2'Fluoro
  misc_feature (15)..(17): 2'-O-methyl
  misc_feature (18)..(19): 2'-deoxy-2'Fluoro
  misc_feature (1). .(19): ribonucleotide unmodified or modified as described for this sequence
gccucaggcugcucagguctt

SEQ ID NO: 2787 - DNA, 21 bp, Artificial Sequence
  Description of Artificial Sequence: Target Sequence/siNA antisense region (stab22)
  misc_feature (21)..(21): 3'-3 attached terminal deoxyabasic moiety, inverted abasic, inverted nucleotide or other terminal cap that is optionally present
  misc_feature (20)..(20): Phosphorothioate or Phosphorodithioate 3'-Internucleotide Linkage (optionally present)
  misc_feature (1). .(19): ribonucleotide unmodified or modified as described for this sequence
gccucaggcugcucagguctt

SEQ ID NO: 2788 - DNA, 21 bp, Artificial Sequence
  Description of Artificial Sequence: Target Sequence/siNA antisense region (stab25)
  misc_feature (4)..(5): 2'-deoxy-2'Fluoro
  misc_feature (6)..(8): 2'-O-methyl
  misc_feature (9)..(10): 2'-deoxy-2'Fluoro
  misc_feature (11)..(11): 2'-O-methyl
  misc_feature (12)..(14): 2'-deoxy-2'Fluoro
  misc_feature (15)..(17): 2'-O-methyl
  misc_feature (18)..(19): 2'-deoxy-2'Fluoro
  misc_feature (20)..(20): Phosphorothioate or Phosphorodithioate 3'-Internucleotide Linkage (optionally present)
  misc_feature (1)..(19): ribonucleotide unmodified or modified as described for this sequence
gccucaggcugcucagguctt

SEQ ID NO: 2789 - RNA, 21 nt, Artificial Sequence
  Description of Artificial Sequence: Target Sequence/siNA antisense region (stab35)
  misc_feature (4)..(5): 2'-deoxy-2'Fluoro
  misc_feature (6)..(8): 2'-O-methyl
  misc_feature (9)..(10): 2'-deoxy-2'Fluoro
  misc_feature (11)..(11): 2'-O-methyl
  misc_feature (12)..(14): 2'-deoxy-2'Fluoro
  misc_feature (15)..(17): 2'-O-methyl
  misc_feature (18)..(19): 2'-deoxy-2'Fluoro
  misc_feature (20)..(21): 2'-O-methyl
gccucaggcugcucaggucuu

SEQ ID NO: 2790 - RNA, 21 nt, Artificial Sequence
  Description of Artificial Sequence: Target Sequence/siNA antisense region (stab36)
  misc_feature (4)..(5): 2'-deoxy-2'Fluoro
  misc_feature (6)..(8): 2'-O-methyl
  misc_feature (9)..(10): 2'-deoxy-2'Fluoro
  misc_feature (11)..(11): 2'-O-methyl
  misc_feature (12)..(14): 2'-deoxy-2'Fluoro
  misc_feature (15)..(17): 2'-O-methyl
  misc_feature (18)..(19): 2'-deoxy-2'Fluoro
  misc_feature (20)..(21): 2'-O-methyl
gccucaggcugcucagguccc

SEQ ID NO: 2791 - RNA, 19 nt, Artificial Sequence
  Description of Artificial Sequence: Target Sequence/siNA sense region
cggcuggcacagagcuucc

SEQ ID NO: 2792 - RNA, 19 nt, Artificial Sequence
  Description of Artificial Sequence: Target Sequence/siNA antisense region
ggaagcucugugccagccg

SEQ ID NO: 2793 - DNA, 21 bp, Artificial Sequence
  Description of Artificial Sequence: Target Sequence/siNA sense region (stab00)
  misc_feature (1). .(19): ribonucleotide unmodified or modified as described for this sequence
cggcuggcacagagcuucctt

SEQ ID NO: 2794 - DNA, 21 bp, Artificial Sequence
  Description of Artificial Sequence: Target Sequence/siNA antisense region (stab00as)
  misc_feature (1). .(19): ribonucleotide unmodified or modified as described for this sequence
ggaagcucugugccagccgtt

SEQ ID NO: 2795 - DNA, 21 bp, Artificial Sequence
  Description of Artificial Sequence: Target Sequence/siNA sense region (stab04)
  misc_feature (1)..(1): 5'-3 attached terminal deoxyabasic moiety, inverted abasic, inverted nucleotide or other terminal cap that is optionally present
  misc_feature (21)..(21): 3'-3 attached terminal deoxyabasic moiety, inverted abasic, inverted nucleotide or other terminal cap that is optionally present
  misc_feature (1)..(1): 2'-deoxy-2'Fluoro
  misc_feature (4)..(5): 2'-deoxy-2'Fluoro
  misc_feature (8)..(8): 2'-deoxy-2'Fluoro
  misc_feature (10)..(10): 2'-deoxy-2'Fluoro
  misc_feature (15)..(19): 2'-deoxy-2'Fluoro
  misc_feature (1)..(19): ribonucleotide unmodified or modified as described for this sequence
cggcuggcacagagcuucctt

SEQ ID NO: 2796 - DNA, 21 bp, Artificial Sequence
  Description of Artificial Sequence: Target Sequence/siNA antisense region (stab05)
  misc_feature (6)..(9): 2'-deoxy-2'Fluoro
  misc_feature (11)..(11): 2'-deoxy-2'Fluoro
  misc_feature (13)..(14): 2'-deoxy-2'Fluoro
  misc_feature (17)..(18): 2'-deoxy-2'Fluoro
  misc_feature (20)..(20): Phosphorothioate or Phosphorodithioate 3'-Internucleotide Linkage (optionally present)
  misc_feature (1). .(19): ribonucleotide unmodified or modified as described for this sequence
ggaagcucugugccagccgtt

SEQ ID NO: 2797 - DNA, 21 bp, Artificial Sequence
  Description of Artificial Sequence: Target Sequence/siNA sense region (stab07)
  misc_feature (1)..(1): 5'-3 attached terminal deoxyabasic moiety, inverted abasic, inverted nucleotide or other terminal cap that is optionally present
  misc_feature (21)..(21): 3'-3 attached terminal deoxyabasic moiety, inverted abasic, inverted nucleotide or other terminal cap that is optionally present
  misc_feature (1)..(1): 2'-deoxy-2'Fluoro
  misc_feature (4)..(5): 2'-deoxy-2'Fluoro
  misc_feature (8)..(8): 2'-deoxy-2'Fluoro
  misc_feature (10)..(10): 2'-deoxy-2'Fluoro
  misc_feature (15)..(19): 2'-deoxy-2'Fluoro
  misc_feature (1). .(19): ribonucleotide unmodified or modified as described for this sequence
cggcuggcacagagcuucctt

SEQ ID NO: 2798 - DNA, 21 bp, Artificial Sequence
  Description of Artificial Sequence: Target Sequence/siNA antisense region (stab08)
  misc_feature (1)..(5): 2'-O-methyl
  misc_feature (6)..(9): 2'-deoxy-2'Fluoro
  misc_feature (10)..(10): 2'-O-methyl
  misc_feature (11)..(11): 2'-deoxy-2'Fluoro
  misc_feature (12)..(12): 2'-O-methyl
  misc_feature (13)..(14): 2'-deoxy-2'Fluoro
  misc_feature (15)..(16): 2'-O-methyl
  misc_feature (17)..(18): 2'-deoxy-2'Fluoro
  misc_feature (19)..(19): 2'-O-methyl
  misc_feature (20)..(20): Phosphorothioate or Phosphorodithioate 3'-Internucleotide Linkage (optionally present)
  misc_feature (1). .(19): ribonucleotide unmodified or modified as described for this sequence
ggaagcucugugccagccgtt

SEQ ID NO: 2799 - DNA, 21 bp, Artificial Sequence
  Description of Artificial Sequence: Target Sequence/siNA sense region (stab09)
  misc_feature (1)..(1): 5'-3 attached terminal deoxyabasic moiety, inverted abasic, inverted nucleotide or other terminal cap that is optionally present
  misc_feature (21)..(21): 3'-3 attached terminal deoxyabasic moiety, inverted abasic, inverted nucleotide or other terminal cap that is optionally present
  misc_feature (1). .(19): ribonucleotide unmodified or modified as described for this sequence
cggcuggcacagagcuucctt

SEQ ID NO: 2800 - DNA, 21 bp, Artificial Sequence
  Description of Artificial Sequence: Target Sequence/siNA antisense region (stab10)
  misc_feature (20)..(20): Phosphorothioate or Phosphorodithioate 3'-Internucleotide Linkage (optionally present)
  misc_feature (1). .(19): ribonucleotide unmodified or modified as described for this sequence
ggaagcucugugccagccgtt

SEQ ID NO: 2801 - DNA, 21 bp, Artificial Sequence
  Description of Artificial Sequence: Target Sequence/siNA antisense region (stab19)
  misc_feature (21)..(21): 3'-3 attached terminal deoxyabasic moiety, inverted abasic, inverted nucleotide or other terminal cap that is optionally present
  misc_feature (1)..(5): 2'-O-methyl
  misc_feature (6)..(9): 2'-deoxy-2'Fluoro
  misc_feature (10)..(10): 2'-O-methyl
  misc_feature (11)..(11): 2'-deoxy-2'Fluoro
  misc_feature (12)..(12): 2'-O-methyl
  misc_feature (13)..(14): 2'-deoxy-2'Fluoro
  misc_feature (15)..(16): 2'-O-methyl
  misc_feature (17)..(18): 2'-deoxy-2'Fluoro
  misc_feature (19)..(19): 2'-O-methyl
  misc_feature (1). .(19): ribonucleotide unmodified or modified as described for this sequence
ggaagcucugugccagccgtt

SEQ ID NO: 2802 - DNA, 21 bp, Artificial Sequence
  Description of Artificial Sequence: Target Sequence/siNA antisense region (stab22)
  misc_feature (21)..(21): 3'-3 attached terminal deoxyabasic moiety, inverted abasic, inverted nucleotide or other terminal cap that is optionally present
  misc_feature (20)..(20): Phosphorothioate or Phosphorodithioate 3'-Internucleotide Linkage (optionally present)
  misc_feature (1). .(19): ribonucleotide unmodified or modified as described for this sequence
ggaagcucugugccagccgtt

SEQ ID NO: 2803 - DNA, 21 bp, Artificial Sequence
  Description of Artificial Sequence: Target Sequence/siNA antisense region (stab25)
  misc_feature (4)..(5): 2'-O-methyl
  misc_feature (6)..(9): 2'-deoxy-2'Fluoro
  misc_feature (10)..(10): 2'-O-methyl
  misc_feature (11)..(11): 2'-deoxy-2'Fluoro
  misc_feature (12)..(12): 2'-O-methyl
  misc_feature (13)..(14): 2'-deoxy-2'Fluoro
  misc_feature (15)..(16): 2'-O-methyl
  misc_feature (17)..(18): 2'-deoxy-2'Fluoro
  misc_feature (19)..(19): 2'-O-methyl
  misc_feature (20)..(20): Phosphorothioate or Phosphorodithioate 3'-Internucleotide Linkage (optionally present)
  misc_feature (1)..(19): ribonucleotide unmodified or modified as described for this sequence
ggaagcucugugccagccgtt

SEQ ID NO: 2804 - RNA, 21 nt, Artificial Sequence
  Description of Artificial Sequence: Target Sequence/siNA antisense region (stab35)
  misc_feature (4)..(5): 2'-O-methyl
  misc_feature (6)..(9): 2'-deoxy-2'Fluoro
  misc_feature (10)..(10): 2'-O-methyl
  misc_feature (11)..(11): 2'-deoxy-2'Fluoro
  misc_feature (12)..(12): 2'-O-methyl
  misc_feature (13)..(14): 2'-deoxy-2'Fluoro
  misc_feature (15)..(16): 2'-O-methyl
  misc_feature (17)..(18): 2'-deoxy-2'Fluoro
  misc_feature (19)..(21): 2'-O-methyl
ggaagcucugugccagccguu

SEQ ID NO: 2805 - RNA, 21 nt, Artificial Sequence
  Description of Artificial Sequence: Target Sequence/siNA antisense region (stab36)
  misc_feature (4)..(5): 2'-O-methyl
  misc_feature (6)..(9): 2'-deoxy-2'Fluoro
  misc_feature (10)..(10): 2'-O-methyl
  misc_feature (11)..(11): 2'-deoxy-2'Fluoro
  misc_feature (12)..(12): 2'-O-methyl
  misc_feature (13)..(14): 2'-deoxy-2'Fluoro
  misc_feature (15)..(16): 2'-O-methyl
  misc_feature (17)..(18): 2'-deoxy-2'Fluoro
  misc_feature (19)..(21): 2'-O-methyl
ggaagcucugugccagccgcc

SEQ ID NO: 2806 - RNA, 19 nt, Artificial Sequence
  Description of Artificial Sequence: Target Sequence/siNA sense region
cggcccgccaugcggaggg

SEQ ID NO: 2807 - RNA, 19 nt, Artificial Sequence
  Description of Artificial Sequence: Target Sequence/siNA antisense region
cccuccgcauggcgggccg

SEQ ID NO: 2808 - DNA, 21 bp, Artificial Sequence
  Description of Artificial Sequence: Target Sequence/siNA sense region (stab00)
  misc_feature (1). .(19): ribonucleotide unmodified or modified as described for this sequence
cggcccgccaugcggagggtt

SEQ ID NO: 2809 - DNA, 21 bp, Artificial Sequence
  Description of Artificial Sequence: Target Sequence/siNA antisense region (stab00as)
  misc_feature (1). .(19): ribonucleotide unmodified or modified as described for this sequence
cccuccgcauggcgggccgtt

SEQ ID NO: 2810 - DNA, 21 bp, Artificial Sequence
  Description of Artificial Sequence: Target Sequence/siNA sense region (stab04)
  misc_feature (1)..(1): 5'-3 attached terminal deoxyabasic moiety, inverted abasic, inverted nucleotide or other terminal cap that is optionally present
  misc_feature (21)..(21): 3'-3 attached terminal deoxyabasic moiety, inverted abasic, inverted nucleotide or other terminal cap that is optionally present
  misc_feature (1)..(1): 2'-deoxy-2'Fluoro
  misc_feature (4)..(6): 2'-deoxy-2'Fluoro
  misc_feature (8)..(9): 2'-deoxy-2'Fluoro
  misc_feature (11)..(11): 2'-deoxy-2'Fluoro
  misc_feature (13)..(13): 2'-deoxy-2'Fluoro
  misc_feature (1)..(19): ribonucleotide unmodified or modified as described for this sequence
cggcccgccaugcggagggtt

SEQ ID NO: 2811 - DNA, 21 bp, Artificial Sequence
  Description of Artificial Sequence: Target Sequence/siNA antisense region (stab05)
  misc_feature (1)..(6): 2'-deoxy-2'Fluoro
  misc_feature (8)..(8): 2'-deoxy-2'Fluoro
  misc_feature (10)..(10): 2'-deoxy-2'Fluoro
  misc_feature (13)..(13): 2'-deoxy-2'Fluoro
  misc_feature (17)..(18): 2'-deoxy-2'Fluoro
  misc_feature (20)..(20): Phosphorothioate or Phosphorodithioate 3'-Internucleotide Linkage (optionally present)
  misc_feature (1)..(19): ribonucleotide unmodified or modified as described for this sequence
cccuccgcauggcgggccgtt

SEQ ID NO: 2812 - DNA, 21 bp, Artificial Sequence
  Description of Artificial Sequence: Target Sequence/siNA sense region (stab07)
  misc_feature (1)..(1): 5'-3 attached terminal deoxyabasic moiety, inverted abasic, inverted nucleotide or other terminal cap that is optionally present
  misc_feature (21)..(21): 3'-3 attached terminal deoxyabasic moiety, inverted abasic, inverted nucleotide or other terminal cap that is optionally present
  misc_feature (1)..(1): 2'-deoxy-2'Fluoro
  misc_feature (4)..(6): 2'-deoxy-2'Fluoro
  misc_feature (8)..(9): 2'-deoxy-2'Fluoro
  misc_feature (11)..(11): 2'-deoxy-2'Fluoro
  misc_feature (13)..(13): 2'-deoxy-2'Fluoro
  misc_feature (1). .(19): ribonucleotide unmodified or modified as described for this sequence
cggcccgccaugcggagggtt

SEQ ID NO: 2813 - DNA, 21 bp, Artificial Sequence
  Description of Artificial Sequence: Target Sequence/siNA antisense region (stab08)
  misc_feature (1)..(6): 2'-deoxy-2'Fluoro
  misc_feature (7)..(7): 2'-O-methyl
  misc_feature (8)..(8): 2'-deoxy-2'Fluoro
  misc_feature (9)..(9): 2'-O-methyl
  misc_feature (10)..(10): 2'-deoxy-2'Fluoro
  misc_feature (11)..(12): 2'-O-methyl
  misc_feature (13)..(13): 2'-deoxy-2'Fluoro
  misc_feature (14)..(16): 2'-O-methyl
  misc_feature (17)..(18): 2'-deoxy-2'Fluoro
  misc_feature (19)..(19): 2'-O-methyl
  misc_feature (20)..(20): Phosphorothioate or Phosphorodithioate 3'-Internucleotide Linkage (optionally present)
  misc_feature (1). .(19): ribonucleotide unmodified or modified as described for this sequence
cccuccgcauggcgggccgtt

SEQ ID NO: 2814 - DNA, 21 bp, Artificial Sequence
  Description of Artificial Sequence: Target Sequence/siNA sense region (stab09)
  misc_feature (1)..(1): 5'-3 attached terminal deoxyabasic moiety, inverted abasic, inverted nucleotide or other terminal cap that is optionally present
  misc_feature (21)..(21): 3'-3 attached terminal deoxyabasic moiety, inverted abasic, inverted nucleotide or other terminal cap that is optionally present
  misc_feature (1). .(19): ribonucleotide unmodified or modified as described for this sequence
cggcccgccaugcggagggtt

SEQ ID NO: 2815 - DNA, 21 bp, Artificial Sequence
  Description of Artificial Sequence: Target Sequence/siNA antisense region (stab10)
  misc_feature (20)..(20): Phosphorothioate or Phosphorodithioate 3'-Internucleotide Linkage (optionally present)
  misc_feature (1). .(19): ribonucleotide unmodified or modified as described for this sequence
cccuccgcauggcgggccgtt

SEQ ID NO: 2816 - DNA, 21 bp, Artificial Sequence
  Description of Artificial Sequence: Target Sequence/siNA antisense region (stab19)
  misc_feature (21)..(21): 3'-3 attached terminal deoxyabasic moiety, inverted abasic, inverted nucleotide or other terminal cap that is optionally present
  misc_feature (1)..(6): 2'-deoxy-2'Fluoro
  misc_feature (7)..(7): 2'-O-methyl
  misc_feature (8)..(8): 2'-deoxy-2'Fluoro
  misc_feature (9)..(9): 2'-O-methyl
  misc_feature (10)..(10): 2'-deoxy-2'Fluoro
  misc_feature (11)..(12): 2'-O-methyl
  misc_feature (13)..(13): 2'-deoxy-2'Fluoro
  misc_feature (14)..(16): 2'-O-methyl
  misc_feature (17)..(18): 2'-deoxy-2'Fluoro
  misc_feature (19)..(19): 2'-O-methyl
  misc_feature (1). .(19): ribonucleotide unmodified or modified as described for this sequence
cccuccgcauggcgggccgtt

SEQ ID NO: 2817 - DNA, 21 bp, Artificial Sequence
  Description of Artificial Sequence: Target Sequence/siNA antisense region (stab22)
  misc_feature (21)..(21): 3'-3 attached terminal deoxyabasic moiety, inverted abasic, inverted nucleotide or other terminal cap that is optionally present
  misc_feature (20)..(20): Phosphorothioate or Phosphorodithioate 3'-Internucleotide Linkage (optionally present)
  misc_feature (1). .(19): ribonucleotide unmodified or modified as described for this sequence
cccuccgcauggcgggccgtt

SEQ ID NO: 2818 - DNA, 21 bp, Artificial Sequence
  Description of Artificial Sequence: Target Sequence/siNA antisense region (stab25)
  misc_feature (4)..(6): 2'-deoxy-2'Fluoro
  misc_feature (7)..(7): 2'-O-methyl
  misc_feature (8)..(8): 2'-deoxy-2'Fluoro
  misc_feature (9)..(9): 2'-O-methyl
  misc_feature (10)..(10): 2'-deoxy-2'Fluoro
  misc_feature (11)..(12): 2'-O-methyl
  misc_feature (13)..(13): 2'-deoxy-2'Fluoro
  misc_feature (14)..(16): 2'-O-methyl
  misc_feature (17)..(18): 2'-deoxy-2'Fluoro
  misc_feature (19)..(19): 2'-O-methyl
  misc_feature (20)..(20): Phosphorothioate or Phosphorodithioate 3'-Internucleotide Linkage (optionally present)
  misc_feature (1)..(19): ribonucleotide unmodified or modified as described for this sequence
cccuccgcauggcgggccgtt

SEQ ID NO: 2819 - RNA, 21 nt, Artificial Sequence
  Description of Artificial Sequence: Target Sequence/siNA antisense region (stab35)
  misc_feature (4)..(6): 2'-deoxy-2'Fluoro
  misc_feature (7)..(7): 2'-O-methyl
  misc_feature (8)..(8): 2'-deoxy-2'Fluoro
  misc_feature (9)..(9): 2'-O-methyl
  misc_feature (10)..(10): 2'-deoxy-2'Fluoro
  misc_feature (11)..(12): 2'-O-methyl
  misc_feature (13)..(13): 2'-deoxy-2'Fluoro
  misc_feature (14)..(16): 2'-O-methyl
  misc_feature (17)..(18): 2'-deoxy-2'Fluoro
  misc_feature (19)..(21): 2'-O-methyl
cccuccgcauggcgggccguu

SEQ ID NO: 2820 - RNA, 21 nt, Artificial Sequence
  Description of Artificial Sequence: Target Sequence/siNA antisense region (stab36)
  misc_feature (4)..(6): 2'-deoxy-2'Fluoro
  misc_feature (7)..(7): 2'-O-methyl
  misc_feature (8)..(8): 2'-deoxy-2'Fluoro
  misc_feature (9)..(9): 2'-O-methyl
  misc_feature (10)..(10): 2'-deoxy-2'Fluoro
  misc_feature (11)..(12): 2'-O-methyl
  misc_feature (13)..(13): 2'-deoxy-2'Fluoro
  misc_feature (14)..(16): 2'-O-methyl
  misc_feature (17)..(18): 2'-deoxy-2'Fluoro
  misc_feature (19)..(21): 2'-O-methyl
cccuccgcauggcgggccgga

SEQ ID NO: 2821 - RNA, 19 nt, Artificial Sequence
  Description of Artificial Sequence: Target Sequence/siNA sense region
guguuccuacaugaggcca

SEQ ID NO: 2822 - RNA, 19 nt, Artificial Sequence
  Description of Artificial Sequence: Target Sequence/siNA antisense region
uggccucauguaggaacac

SEQ ID NO: 2823 - DNA, 21 bp, Artificial Sequence
  Description of Artificial Sequence: Target Sequence/siNA sense region (stab00)
  misc_feature (1). .(19): ribonucleotide unmodified or modified as described for this sequence
guguuccuacaugaggccatt

SEQ ID NO: 2824 - DNA, 21 bp, Artificial Sequence
  Description of Artificial Sequence: Target Sequence/siNA antisense region (stab00as)
  misc_feature (1). .(19): ribonucleotide unmodified or modified as described for this sequence
uggccucauguaggaacactt

SEQ ID NO: 2825 - DNA, 21 bp, Artificial Sequence
  Description of Artificial Sequence: Target Sequence/siNA sense region (stab04)
  misc_feature (1)..(1): 5'-3 attached terminal deoxyabasic moiety, inverted abasic, inverted nucleotide or other terminal cap that is optionally present
  misc_feature (21)..(21): 3'-3 attached terminal deoxyabasic moiety, inverted abasic, inverted nucleotide or other terminal cap that is optionally present
  misc_feature (2)..(2): 2'-deoxy-2'Fluoro
  misc_feature (4)..(8): 2'-deoxy-2'Fluoro
  misc_feature (10)..(10): 2'-deoxy-2'Fluoro
  misc_feature (12)..(12): 2'-deoxy-2'Fluoro
  misc_feature (17)..(18): 2'-deoxy-2'Fluoro
  misc_feature (1)..(19): ribonucleotide unmodified or modified as described for this sequence
guguuccuacaugaggccatt

SEQ ID NO: 2826 - DNA, 21 bp, Artificial Sequence
  Description of Artificial Sequence: Target Sequence/siNA antisense region (stab05)
  misc_feature (1)..(1): 2'-deoxy-2'Fluoro
  misc_feature (4)..(7): 2'-deoxy-2'Fluoro
  misc_feature (9)..(9): 2'-deoxy-2'Fluoro
  misc_feature (11)..(11): 2'-deoxy-2'Fluoro
  misc_feature (17)..(17): 2'-deoxy-2'Fluoro
  misc_feature (19)..(19): 2'-deoxy-2'Fluoro
  misc_feature (20)..(20): Phosphorothioate or Phosphorodithioate 3'-Internucleotide Linkage (optionally present)
  misc_feature (1)..(19): ribonucleotide unmodified or modified as described for this sequence
uggccucauguaggaacactt

SEQ ID NO: 2827 - DNA, 21 bp, Artificial Sequence
  Description of Artificial Sequence: Target Sequence/siNA sense region (stab07)
  misc_feature (1)..(1): 5'-3 attached terminal deoxyabasic moiety, inverted abasic, inverted nucleotide or other terminal cap that is optionally present
  misc_feature (21)..(21): 3'-3 attached terminal deoxyabasic moiety, inverted abasic, inverted nucleotide or other terminal cap that is optionally present
  misc_feature (2)..(2): 2'-deoxy-2'Fluoro
  misc_feature (4)..(8): 2'-deoxy-2'Fluoro
  misc_feature (10)..(10): 2'-deoxy-2'Fluoro
  misc_feature (12)..(12): 2'-deoxy-2'Fluoro
  misc_feature (17)..(18): 2'-deoxy-2'Fluoro
  misc_feature (1). .(19): ribonucleotide unmodified or modified as described for this sequence
guguuccuacaugaggccatt

SEQ ID NO: 2828 - DNA, 21 bp, Artificial Sequence
  Description of Artificial Sequence: Target Sequence/siNA antisense region (stab08)
  misc_feature (1)..(1): 2'-deoxy-2'Fluoro
  misc_feature (2)..(3): 2'-O-methyl
  misc_feature (4)..(7): 2'-deoxy-2'Fluoro
  misc_feature (8)..(8): 2'-O-methyl
  misc_feature (9)..(9): 2'-deoxy-2'Fluoro
  misc_feature (10)..(10): 2'-O-methyl
  misc_feature (11)..(11): 2'-deoxy-2'Fluoro
  misc_feature (12)..(16): 2'-O-methyl
  misc_feature (17)..(17): 2'-deoxy-2'Fluoro
  misc_feature (18)..(18): 2'-O-methyl
  misc_feature (19)..(19): 2'-deoxy-2'Fluoro
  misc_feature (20)..(20): Phosphorothioate or Phosphorodithioate 3'-Internucleotide Linkage (optionally present)
  misc_feature (1). .(19): ribonucleotide unmodified or modified as described for this sequence
uggccucauguaggaacactt

SEQ ID NO: 2829 - DNA, 21 bp, Artificial Sequence
  Description of Artificial Sequence: Target Sequence/siNA sense region (stab09)
  misc_feature (1)..(1): 5'-3 attached terminal deoxyabasic moiety, inverted abasic, inverted nucleotide or other terminal cap that is optionally present
  misc_feature (21)..(21): 3'-3 attached terminal deoxyabasic moiety, inverted abasic, inverted nucleotide or other terminal cap that is optionally present
  misc_feature (1). .(19): ribonucleotide unmodified or modified as described for this sequence
guguuccuacaugaggccatt

SEQ ID NO: 2830 - DNA, 21 bp, Artificial Sequence
  Description of Artificial Sequence: Target Sequence/siNA antisense region (stab10)
  misc_feature (20)..(20): Phosphorothioate or Phosphorodithioate 3'-Internucleotide Linkage (optionally present)
  misc_feature (1). .(19): ribonucleotide unmodified or modified as described for this sequence
uggccucauguaggaacactt

SEQ ID NO: 2831 - DNA, 21 bp, Artificial Sequence
  Description of Artificial Sequence: Target Sequence/siNA antisense region (stab19)
  misc_feature (21)..(21): 3'-3 attached terminal deoxyabasic moiety, inverted abasic, inverted nucleotide or other terminal cap that is optionally present
  misc_feature (1)..(1): 2'-deoxy-2'Fluoro
  misc_feature (2)..(3): 2'-O-methyl
  misc_feature (4)..(7): 2'-deoxy-2'Fluoro
  misc_feature (8)..(8): 2'-O-methyl
  misc_feature (9)..(9): 2'-deoxy-2'Fluoro
  misc_feature (10)..(10): 2'-O-methyl
  misc_feature (11)..(11): 2'-deoxy-2'Fluoro
  misc_feature (12)..(16): 2'-O-methyl
  misc_feature (17)..(17): 2'-deoxy-2'Fluoro
  misc_feature (18)..(18): 2'-O-methyl
  misc_feature (19)..(19): 2'-deoxy-2'Fluoro
  misc_feature (1). .(19): ribonucleotide unmodified or modified as described for this sequence
uggccucauguaggaacactt

SEQ ID NO: 2832 - DNA, 21 bp, Artificial Sequence
  Description of Artificial Sequence: Target Sequence/siNA antisense region (stab22)
  misc_feature (21)..(21): 3'-3 attached terminal deoxyabasic moiety, inverted abasic, inverted nucleotide or other terminal cap that is optionally present
  misc_feature (20)..(20): Phosphorothioate or Phosphorodithioate 3'-Internucleotide Linkage (optionally present)
  misc_feature (1). .(19): ribonucleotide unmodified or modified as described for this sequence
uggccucauguaggaacactt

SEQ ID NO: 2833 - DNA, 21 bp, Artificial Sequence
  Description of Artificial Sequence: Target Sequence/siNA antisense region (stab25)
  misc_feature (4)..(7): 2'-deoxy-2'Fluoro
  misc_feature (8)..(8): 2'-O-methyl
  misc_feature (9)..(9): 2'-deoxy-2'Fluoro
  misc_feature (10)..(10): 2'-O-methyl
  misc_feature (11)..(11): 2'-deoxy-2'Fluoro
  misc_feature (12)..(16): 2'-O-methyl
  misc_feature (17)..(17): 2'-deoxy-2'Fluoro
  misc_feature (18)..(18): 2'-O-methyl
  misc_feature (19)..(19): 2'-deoxy-2'Fluoro
  misc_feature (20)..(20): Phosphorothioate or Phosphorodithioate 3'-Internucleotide Linkage (optionally present)
  misc_feature (1)..(19): ribonucleotide unmodified or modified as described for this sequence
uggccucauguaggaacactt

SEQ ID NO: 2834 - RNA, 21 nt, Artificial Sequence
  Description of Artificial Sequence: Target Sequence/siNA antisense region (stab35)
  misc_feature (4)..(7): 2'-deoxy-2'Fluoro
  misc_feature (8)..(8): 2'-O-methyl
  misc_feature (9)..(9): 2'-deoxy-2'Fluoro
  misc_feature (10)..(10): 2'-O-methyl
  misc_feature (11)..(11): 2'-deoxy-2'Fluoro
  misc_feature (12)..(16): 2'-O-methyl
  misc_feature (17)..(17): 2'-deoxy-2'Fluoro
  misc_feature (18)..(18): 2'-O-methyl
  misc_feature (19)..(19): 2'-deoxy-2'Fluoro
  misc_feature (20)..(21): 2'-O-methyl
uggccucauguaggaacacuu

SEQ ID NO: 2835 - RNA, 21 nt, Artificial Sequence
  Description of Artificial Sequence: Target Sequence/siNA antisense region (stab36)
  misc_feature (4)..(7): 2'-deoxy-2'Fluoro
  misc_feature (8)..(8): 2'-O-methyl
  misc_feature (9)..(9): 2'-deoxy-2'Fluoro
  misc_feature (10)..(10): 2'-O-methyl
  misc_feature (11)..(11): 2'-deoxy-2'Fluoro
  misc_feature (12)..(16): 2'-O-methyl
  misc_feature (17)..(17): 2'-deoxy-2'Fluoro
  misc_feature (18)..(18): 2'-O-methyl
  misc_feature (19)..(19): 2'-deoxy-2'Fluoro
  misc_feature (20)..(21): 2'-O-methyl
uggccucauguaggaacaccc

SEQ ID NO: 2836 - RNA, 19 nt, Artificial Sequence
  Description of Artificial Sequence: Target Sequence/siNA sense region
acggcccggcugauggcgg

SEQ ID NO: 2837 - RNA, 19 nt, Artificial Sequence
  Description of Artificial Sequence: Target Sequence/siNA antisense region
ccgccaucagccgggccgu

SEQ ID NO: 2838 - DNA, 21 bp, Artificial Sequence
  Description of Artificial Sequence: Target Sequence/siNA sense region (stab00)
  misc_feature (1). .(19): ribonucleotide unmodified or modified as described for this sequence
acggcccggcugauggcggtt

SEQ ID NO: 2839 - DNA, 21 bp, Artificial Sequence
  Description of Artificial Sequence: Target Sequence/siNA antisense region (stab00as)
  misc_feature (1). .(19): ribonucleotide unmodified or modified as described for this sequence
ccgccaucagccgggccgutt

SEQ ID NO: 2840 - DNA, 21 bp, Artificial Sequence
  Description of Artificial Sequence: Target Sequence/siNA sense region (stab04)
  misc_feature (1)..(1): 5'-3 attached terminal deoxyabasic moiety, inverted abasic, inverted nucleotide or other terminal cap that is optionally present
  misc_feature (21)..(21): 3'-3 attached terminal deoxyabasic moiety, inverted abasic, inverted nucleotide or other terminal cap that is optionally present
  misc_feature (2)..(2): 2'-deoxy-2'Fluoro
  misc_feature (5)..(7): 2'-deoxy-2'Fluoro
  misc_feature (10)..(11): 2'-deoxy-2'Fluoro
  misc_feature (14)..(14): 2'-deoxy-2'Fluoro
  misc_feature (17)..(17): 2'-deoxy-2'Fluoro
  misc_feature (1)..(19): ribonucleotide unmodified or modified as described for this sequence
acggcccggcugauggcggtt

SEQ ID NO: 2841 - DNA, 21 bp, Artificial Sequence
  Description of Artificial Sequence: Target Sequence/siNA antisense region (stab05)
  misc_feature (1)..(2): 2'-deoxy-2'Fluoro
  misc_feature (4)..(5): 2'-deoxy-2'Fluoro
  misc_feature (7)..(8): 2'-deoxy-2'Fluoro
  misc_feature (11)..(12): 2'-deoxy-2'Fluoro
  misc_feature (16)..(17): 2'-deoxy-2'Fluoro
  misc_feature (19)..(19): 2'-deoxy-2'Fluoro
  misc_feature (20)..(20): Phosphorothioate or Phosphorodithioate 3'-Internucleotide Linkage (optionally present)
  misc_feature (1)..(19): ribonucleotide unmodified or modified as described for this sequence
ccgccaucagccgggccgutt

SEQ ID NO: 2842 - DNA, 21 bp, Artificial Sequence
  Description of Artificial Sequence: Target Sequence/siNA sense region (stab07)
  misc_feature (1)..(1): 5'-3 attached terminal deoxyabasic moiety, inverted abasic, inverted nucleotide or other terminal cap that is optionally present
  misc_feature (21)..(21): 3'-3 attached terminal deoxyabasic moiety, inverted abasic, inverted nucleotide or other terminal cap that is optionally present
  misc_feature (2)..(2): 2'-deoxy-2'Fluoro
  misc_feature (5)..(7): 2'-deoxy-2'Fluoro
  misc_feature (10)..(11): 2'-deoxy-2'Fluoro
  misc_feature (14)..(14): 2'-deoxy-2'Fluoro
  misc_feature (17)..(17): 2'-deoxy-2'Fluoro
  misc_feature (1). .(19): ribonucleotide unmodified or modified as described for this sequence
acggcccggcugauggcggtt

SEQ ID NO: 2843 - DNA, 21 bp, Artificial Sequence
  Description of Artificial Sequence: Target Sequence/siNA antisense region (stab08)
  misc_feature (1)..(2): 2'-deoxy-2'Fluoro
  misc_feature (3)..(3): 2'-O-methyl
  misc_feature (4)..(5): 2'-deoxy-2'Fluoro
  misc_feature (6)..(6): 2'-O-methyl
  misc_feature (7)..(8): 2'-deoxy-2'Fluoro
  misc_feature (9)..(10): 2'-O-methyl
  misc_feature (11)..(12): 2'-deoxy-2'Fluoro
  misc_feature (13)..(15): 2'-O-methyl
  misc_feature (16)..(17): 2'-deoxy-2'Fluoro
  misc_feature (18)..(18): 2'-O-methyl
  misc_feature (19)..(19): 2'-deoxy-2'Fluoro
  misc_feature (20)..(20): Phosphorothioate or Phosphorodithioate 3'-Internucleotide Linkage (optionally present)
  misc_feature (1). .(19): ribonucleotide unmodified or modified as described for this sequence
ccgccaucagccgggccgutt

SEQ ID NO: 2844 - DNA, 21 bp, Artificial Sequence
  Description of Artificial Sequence: Target Sequence/siNA sense region (stab09)
  misc_feature (1)..(1): 5'-3 attached terminal deoxyabasic moiety, inverted abasic, inverted nucleotide or other terminal cap that is optionally present
  misc_feature (21)..(21): 3'-3 attached terminal deoxyabasic moiety, inverted abasic, inverted nucleotide or other terminal cap that is optionally present
  misc_feature (1). .(19): ribonucleotide unmodified or modified as described for this sequence
acggcccggcugauggcggtt

SEQ ID NO: 2845 - DNA, 21 bp, Artificial Sequence
  Description of Artificial Sequence: Target Sequence/siNA antisense region (stab10)
  misc_feature (20)..(20): Phosphorothioate or Phosphorodithioate 3'-Internucleotide Linkage (optionally present)
  misc_feature (1). .(19): ribonucleotide unmodified or modified as described for this sequence
ccgccaucagccgggccgutt

SEQ ID NO: 2846 - DNA, 21 bp, Artificial Sequence
  Description of Artificial Sequence: Target Sequence/siNA antisense region (stab19)
  misc_feature (21)..(21): 3'-3 attached terminal deoxyabasic moiety, inverted abasic, inverted nucleotide or other terminal cap that is optionally present
  misc_feature (1)..(2): 2'-deoxy-2'Fluoro
  misc_feature (3)..(3): 2'-O-methyl
  misc_feature (4)..(5): 2'-deoxy-2'Fluoro
  misc_feature (6)..(6): 2'-O-methyl
  misc_feature (7)..(8): 2'-deoxy-2'Fluoro
  misc_feature (9)..(10): 2'-O-methyl
  misc_feature (11)..(12): 2'-deoxy-2'Fluoro
  misc_feature (13)..(15): 2'-O-methyl
  misc_feature (16)..(17): 2'-deoxy-2'Fluoro
  misc_feature (18)..(18): 2'-O-methyl
  misc_feature (19)..(19): 2'-deoxy-2'Fluoro
  misc_feature (1). .(19): ribonucleotide unmodified or modified as described for this sequence
ccgccaucagccgggccgutt

SEQ ID NO: 2847 - DNA, 21 bp, Artificial Sequence
  Description of Artificial Sequence: Target Sequence/siNA antisense region (stab22)
  misc_feature (21)..(21): 3'-3 attached terminal deoxyabasic moiety, inverted abasic, inverted nucleotide or other terminal cap that is optionally present
  misc_feature (20)..(20): Phosphorothioate or Phosphorodithioate 3'-Internucleotide Linkage (optionally present)
  misc_feature (1). .(19): ribonucleotide unmodified or modified as described for this sequence
ccgccaucagccgggccgutt

SEQ ID NO: 2848 - DNA, 21 bp, Artificial Sequence
  Description of Artificial Sequence: Target Sequence/siNA antisense region (stab25)
  misc_feature (4)..(5): 2'-deoxy-2'Fluoro
  misc_feature (6)..(6): 2'-O-methyl
  misc_feature (7)..(8): 2'-deoxy-2'Fluoro
  misc_feature (9)..(10): 2'-O-methyl
  misc_feature (11)..(12): 2'-deoxy-2'Fluoro
  misc_feature (13)..(15): 2'-O-methyl
  misc_feature (16)..(17): 2'-deoxy-2'Fluoro
  misc_feature (18)..(18): 2'-O-methyl
  misc_feature (19)..(19): 2'-deoxy-2'Fluoro
  misc_feature (20)..(20): Phosphorothioate or Phosphorodithioate 3'-Internucleotide Linkage (optionally present)
  misc_feature (1)..(19): ribonucleotide unmodified or modified as described for this sequence
ccgccaucagccgggccgutt

SEQ ID NO: 2849 - RNA, 21 nt, Artificial Sequence
  Description of Artificial Sequence: Target Sequence/siNA antisense region (stab35)
  misc_feature (4)..(5): 2'-deoxy-2'Fluoro
  misc_feature (6)..(6): 2'-O-methyl
  misc_feature (7)..(8): 2'-deoxy-2'Fluoro
  misc_feature (9)..(10): 2'-O-methyl
  misc_feature (11)..(12): 2'-deoxy-2'Fluoro
  misc_feature (13)..(15): 2'-O-methyl
  misc_feature (16)..(17): 2'-deoxy-2'Fluoro
  misc_feature (18)..(18): 2'-O-methyl
  misc_feature (19)..(19): 2'-deoxy-2'Fluoro
  misc_feature (20)..(21): 2'-O-methyl
ccgccaucagccgggccguuu

SEQ ID NO: 2850 - RNA, 21 nt, Artificial Sequence
  Description of Artificial Sequence: Target Sequence/siNA antisense region (stab36)
  misc_feature (4)..(5): 2'-deoxy-2'Fluoro
  misc_feature (6)..(6): 2'-O-methyl
  misc_feature (7)..(8): 2'-deoxy-2'Fluoro
  misc_feature (9)..(10): 2'-O-methyl
  misc_feature (11)..(12): 2'-deoxy-2'Fluoro
  misc_feature (13)..(15): 2'-O-methyl
  misc_feature (16)..(17): 2'-deoxy-2'Fluoro
  misc_feature (18)..(18): 2'-O-methyl
  misc_feature (19)..(19): 2'-deoxy-2'Fluoro
  misc_feature (20)..(21): 2'-O-methyl
ccgccaucagccgggccgugg

SEQ ID NO: 2851 - RNA, 19 nt, Artificial Sequence
  Description of Artificial Sequence: Target Sequence/siNA sense region
ggggccagccccacacgga

SEQ ID NO: 2852 - RNA, 19 nt, Artificial Sequence
  Description of Artificial Sequence: Target Sequence/siNA antisense region
uccguguggggcuggcccc

SEQ ID NO: 2853 - DNA, 21 bp, Artificial Sequence
  Description of Artificial Sequence: Target Sequence/siNA sense region (stab00)
  misc_feature (1). .(19): ribonucleotide unmodified or modified as described for this sequence
ggggccagccccacacggatt

SEQ ID NO: 2854 - DNA, 21 bp, Artificial Sequence
  Description of Artificial Sequence: Target Sequence/siNA antisense region (stab00as)
  misc_feature (1). .(19): ribonucleotide unmodified or modified as described for this sequence
uccguguggggcuggcccctt

SEQ ID NO: 2855 - DNA, 21 bp, Artificial Sequence
  Description of Artificial Sequence: Target Sequence/siNA sense region (stab04)
  misc_feature (1)..(1): 5'-3 attached terminal deoxyabasic moiety, inverted abasic, inverted nucleotide or other terminal cap that is optionally present
  misc_feature (21)..(21): 3'-3 attached terminal deoxyabasic moiety, inverted abasic, inverted nucleotide or other terminal cap that is optionally present
  misc_feature (5)..(6): 2'-deoxy-2'Fluoro
  misc_feature (9)..(12): 2'-deoxy-2'Fluoro
  misc_feature (14)..(14): 2'-deoxy-2'Fluoro
  misc_feature (16)..(16): 2'-deoxy-2'Fluoro
  misc_feature (1)..(19): ribonucleotide unmodified or modified as described for this sequence
ggggccagccccacacggatt

SEQ ID NO: 2856 - DNA, 21 bp, Artificial Sequence
  Description of Artificial Sequence: Target Sequence/siNA antisense region (stab05)
  misc_feature (1)..(3): 2'-deoxy-2'Fluoro
  misc_feature (5)..(5): 2'-deoxy-2'Fluoro
  misc_feature (7)..(7): 2'-deoxy-2'Fluoro
  misc_feature (12)..(13): 2'-deoxy-2'Fluoro
  misc_feature (16)..(19): 2'-deoxy-2'Fluoro
  misc_feature (20)..(20): Phosphorothioate or Phosphorodithioate 3'-Internucleotide Linkage (optionally present)
  misc_feature (1)..(19): ribonucleotide unmodified or modified as described for this sequence
uccguguggggcuggcccctt

SEQ ID NO: 2857 - DNA, 21 bp, Artificial Sequence
  Description of Artificial Sequence: Target Sequence/siNA sense region (stab07)
  misc_feature (1)..(1): 5'-3 attached terminal deoxyabasic moiety, inverted abasic, inverted nucleotide or other terminal cap that is optionally present
  misc_feature (21)..(21): 3'-3 attached terminal deoxyabasic moiety, inverted abasic, inverted nucleotide or other terminal cap that is optionally present
  misc_feature (5)..(6): 2'-deoxy-2'Fluoro
  misc_feature (9)..(12): 2'-deoxy-2'Fluoro
  misc_feature (14)..(14): 2'-deoxy-2'Fluoro
  misc_feature (16)..(16): 2'-deoxy-2'Fluoro
  misc_feature (1). .(19): ribonucleotide unmodified or modified as described for this sequence
ggggccagccccacacggatt

SEQ ID NO: 2858 - DNA, 21 bp, Artificial Sequence
  Description of Artificial Sequence: Target Sequence/siNA antisense region (stab08)
  misc_feature (1)..(3): 2'-deoxy-2'Fluoro
  misc_feature (4)..(4): 2'-O-methyl
  misc_feature (5)..(5): 2'-deoxy-2'Fluoro
  misc_feature (6)..(6): 2'-O-methyl
  misc_feature (7)..(7): 2'-deoxy-2'Fluoro
  misc_feature (8)..(11): 2'-O-methyl
  misc_feature (12)..(13): 2'-deoxy-2'Fluoro
  misc_feature (14)..(15): 2'-O-methyl
  misc_feature (16)..(19): 2'-deoxy-2'Fluoro
  misc_feature (20)..(20): Phosphorothioate or Phosphorodithioate 3'-Internucleotide Linkage (optionally present)
  misc_feature (1). .(19): ribonucleotide unmodified or modified as described for this sequence
uccguguggggcuggcccctt

SEQ ID NO: 2859 - DNA, 21 bp, Artificial Sequence
  Description of Artificial Sequence: Target Sequence/siNA sense region (stab09)
  misc_feature (1)..(1): 5'-3 attached terminal deoxyabasic moiety, inverted abasic, inverted nucleotide or other terminal cap that is optionally present
  misc_feature (21)..(21): 3'-3 attached terminal deoxyabasic moiety, inverted abasic, inverted nucleotide or other terminal cap that is optionally present
  misc_feature (1). .(19): ribonucleotide unmodified or modified as described for this sequence
ggggccagccccacacggatt

SEQ ID NO: 2860 - DNA, 21 bp, Artificial Sequence
  Description of Artificial Sequence: Target Sequence/siNA antisense region (stab10)
  misc_feature (20)..(20): Phosphorothioate or Phosphorodithioate 3'-Internucleotide Linkage (optionally present)
  misc_feature (1). .(19): ribonucleotide unmodified or modified as described for this sequence
uccguguggggcuggcccctt

SEQ ID NO: 2861 - DNA, 21 bp, Artificial Sequence
  Description of Artificial Sequence: Target Sequence/siNA antisense region (stab19)
  misc_feature (21)..(21): 3'-3 attached terminal deoxyabasic moiety, inverted abasic, inverted nucleotide or other terminal cap that is optionally present
  misc_feature (1)..(3): 2'-deoxy-2'Fluoro
  misc_feature (4)..(4): 2'-O-methyl
  misc_feature (5)..(5): 2'-deoxy-2'Fluoro
  misc_feature (6)..(6): 2'-O-methyl
  misc_feature (7)..(7): 2'-deoxy-2'Fluoro
  misc_feature (8)..(11): 2'-O-methyl
  misc_feature (12)..(13): 2'-deoxy-2'Fluoro
  misc_feature (14)..(15): 2'-O-methyl
  misc_feature (16)..(19): 2'-deoxy-2'Fluoro
  misc_feature (1). .(19): ribonucleotide unmodified or modified as described for this sequence
uccguguggggcuggcccctt

SEQ ID NO: 2862 - DNA, 21 bp, Artificial Sequence
  Description of Artificial Sequence: Target Sequence/siNA antisense region (stab22)
  misc_feature (21)..(21): 3'-3 attached terminal deoxyabasic moiety, inverted abasic, inverted nucleotide or other terminal cap that is optionally present
  misc_feature (20)..(20): Phosphorothioate or Phosphorodithioate 3'-Internucleotide Linkage (optionally present)
  misc_feature (1). .(19): ribonucleotide unmodified or modified as described for this sequence
uccguguggggcuggcccctt

SEQ ID NO: 2863 - DNA, 21 bp, Artificial Sequence
  Description of Artificial Sequence: Target Sequence/siNA antisense region (stab25)
  misc_feature (4)..(4): 2'-O-methyl
  misc_feature (5)..(5): 2'-deoxy-2'Fluoro
  misc_feature (6)..(6): 2'-O-methyl
  misc_feature (7)..(7): 2'-deoxy-2'Fluoro
  misc_feature (8)..(11): 2'-O-methyl
  misc_feature (12)..(13): 2'-deoxy-2'Fluoro
  misc_feature (14)..(15): 2'-O-methyl
  misc_feature (16)..(19): 2'-deoxy-2'Fluoro
  misc_feature (20)..(20): Phosphorothioate or Phosphorodithioate 3'-Internucleotide Linkage (optionally present)
  misc_feature (1)..(19): ribonucleotide unmodified or modified as described for this sequence
uccguguggggcuggcccctt

SEQ ID NO: 2864 - RNA, 21 nt, Artificial Sequence
  Description of Artificial Sequence: Target Sequence/siNA antisense region (stab35)
  misc_feature (4)..(4): 2'-O-methyl
  misc_feature (5)..(5): 2'-deoxy-2'Fluoro
  misc_feature (6)..(6): 2'-O-methyl
  misc_feature (7)..(7): 2'-deoxy-2'Fluoro
  misc_feature (8)..(11): 2'-O-methyl
  misc_feature (12)..(13): 2'-deoxy-2'Fluoro
  misc_feature (14)..(15): 2'-O-methyl
  misc_feature (16)..(19): 2'-deoxy-2'Fluoro
  misc_feature (20)..(21): 2'-O-methyl
uccguguggggcuggccccuu

SEQ ID NO: 2865 - RNA, 21 nt, Artificial Sequence
  Description of Artificial Sequence: Target Sequence/siNA antisense region (stab36)
  misc_feature (4)..(4): 2'-O-methyl
  misc_feature (5)..(5): 2'-deoxy-2'Fluoro
  misc_feature (6)..(6): 2'-O-methyl
  misc_feature (7)..(7): 2'-deoxy-2'Fluoro
  misc_feature (8)..(11): 2'-O-methyl
  misc_feature (12)..(13): 2'-deoxy-2'Fluoro
  misc_feature (14)..(15): 2'-O-methyl
  misc_feature (16)..(19): 2'-deoxy-2'Fluoro
  misc_feature (20)..(21): 2'-O-methyl
uccguguggggcuggcccccg

SEQ ID NO: 2866 - RNA, 19 nt, Artificial Sequence
  Description of Artificial Sequence: Target Sequence/siNA sense region
acacaccagcuccucgacc

SEQ ID NO: 2867 - RNA, 19 nt, Artificial Sequence
  Description of Artificial Sequence: Target Sequence/siNA antisense region
ggucgaggagcuggugugu

SEQ ID NO: 2868 - DNA, 21 bp, Artificial Sequence
  Description of Artificial Sequence: Target Sequence/siNA sense region (stab00)
  misc_feature (1). .(19): ribonucleotide unmodified or modified as described for this sequence
acacaccagcuccucgacctt

SEQ ID NO: 2869 - DNA, 21 bp, Artificial Sequence
  Description of Artificial Sequence: Target Sequence/siNA antisense region (stab00as)
  misc_feature (1). .(19): ribonucleotide unmodified or modified as described for this sequence
ggucgaggagcuggugugutt

SEQ ID NO: 2870 - DNA, 21 bp, Artificial Sequence
  Description of Artificial Sequence: Target Sequence/siNA sense region (stab04)
  misc_feature (1)..(1): 5'-3 attached terminal deoxyabasic moiety, inverted abasic, inverted nucleotide or other terminal cap that is optionally present
  misc_feature (21)..(21): 3'-3 attached terminal deoxyabasic moiety, inverted abasic, inverted nucleotide or other terminal cap that is optionally present
  misc_feature (2)..(2): 2'-deoxy-2'Fluoro
  misc_feature (4)..(4): 2'-deoxy-2'Fluoro
  misc_feature (6)..(7): 2'-deoxy-2'Fluoro
  misc_feature (10)..(15): 2'-deoxy-2'Fluoro
  misc_feature (18)..(19): 2'-deoxy-2'Fluoro
  misc_feature (1)..(19): ribonucleotide unmodified or modified as described for this sequence
acacaccagcuccucgacctt

SEQ ID NO: 2871 - DNA, 21 bp, Artificial Sequence
  Description of Artificial Sequence: Target Sequence/siNA antisense region (stab05)
  misc_feature (3)..(4): 2'-deoxy-2'Fluoro
  misc_feature (11)..(12): 2'-deoxy-2'Fluoro
  misc_feature (15)..(15): 2'-deoxy-2'Fluoro
  misc_feature (17)..(17): 2'-deoxy-2'Fluoro
  misc_feature (19)..(19): 2'-deoxy-2'Fluoro
  misc_feature (20)..(20): Phosphorothioate or Phosphorodithioate 3'-Internucleotide Linkage (optionally present)
  misc_feature (1)..(19): ribonucleotide unmodified or modified as described for this sequence
ggucgaggagcuggugugutt

SEQ ID NO: 2872 - DNA, 21 bp, Artificial Sequence
  Description of Artificial Sequence: Target Sequence/siNA sense region (stab07)
  misc_feature (1)..(1): 5'-3 attached terminal deoxyabasic moiety, inverted abasic, inverted nucleotide or other terminal cap that is optionally present
  misc_feature (21)..(21): 3'-3 attached terminal deoxyabasic moiety, inverted abasic, inverted nucleotide or other terminal cap that is optionally present
  misc_feature (2)..(2): 2'-deoxy-2'Fluoro
  misc_feature (4)..(4): 2'-deoxy-2'Fluoro
  misc_feature (6)..(7): 2'-deoxy-2'Fluoro
  misc_feature (10)..(15): 2'-deoxy-2'Fluoro
  misc_feature (18)..(19): 2'-deoxy-2'Fluoro
  misc_feature (1). .(19): ribonucleotide unmodified or modified as described for this sequence
acacaccagcuccucgacctt

SEQ ID NO: 2873 - DNA, 21 bp, Artificial Sequence
  Description of Artificial Sequence: Target Sequence/siNA antisense region (stab08)
  misc_feature (1)..(2): 2'-O-methyl
  misc_feature (3)..(4): 2'-deoxy-2'Fluoro
  misc_feature (5)..(10): 2'-O-methyl
  misc_feature (11)..(12): 2'-deoxy-2'Fluoro
  misc_feature (13)..(14): 2'-O-methyl
  misc_feature (15)..(15): 2'-deoxy-2'Fluoro
  misc_feature (16)..(16): 2'-O-methyl
  misc_feature (17)..(17): 2'-deoxy-2'Fluoro
  misc_feature (18)..(18): 2'-O-methyl
  misc_feature (19)..(19): 2'-deoxy-2'Fluoro
  misc_feature (20)..(20): Phosphorothioate or Phosphorodithioate 3'-Internucleotide Linkage (optionally present)
  misc_feature (1). .(19): ribonucleotide unmodified or modified as described for this sequence
ggucgaggagcuggugugutt

SEQ ID NO: 2874 - DNA, 21 bp, Artificial Sequence
  Description of Artificial Sequence: Target Sequence/siNA sense region (stab09)
  misc_feature (1)..(1): 5'-3 attached terminal deoxyabasic moiety, inverted abasic, inverted nucleotide or other terminal cap that is optionally present
  misc_feature (21)..(21): 3'-3 attached terminal deoxyabasic moiety, inverted abasic, inverted nucleotide or other terminal cap that is optionally present
  misc_feature (1). .(19): ribonucleotide unmodified or modified as described for this sequence
acacaccagcuccucgacctt

SEQ ID NO: 2875 - DNA, 21 bp, Artificial Sequence
  Description of Artificial Sequence: Target Sequence/siNA antisense region (stab10)
  misc_feature (20)..(20): Phosphorothioate or Phosphorodithioate 3'-Internucleotide Linkage (optionally present)
  misc_feature (1). .(19): ribonucleotide unmodified or modified as described for this sequence
ggucgaggagcuggugugutt

SEQ ID NO: 2876 - DNA, 21 bp, Artificial Sequence
  Description of Artificial Sequence: Target Sequence/siNA antisense region (stab19)
  misc_feature (21)..(21): 3'-3 attached terminal deoxyabasic moiety, inverted abasic, inverted nucleotide or other terminal cap that is optionally present
  misc_feature (1)..(2): 2'-O-methyl
  misc_feature (3)..(4): 2'-deoxy-2'Fluoro
  misc_feature (5)..(10): 2'-O-methyl
  misc_feature (11)..(12): 2'-deoxy-2'Fluoro
  misc_feature (13)..(14): 2'-O-methyl
  misc_feature (15)..(15): 2'-deoxy-2'Fluoro
  misc_feature (16)..(16): 2'-O-methyl
  misc_feature (17)..(17): 2'-deoxy-2'Fluoro
  misc_feature (18)..(18): 2'-O-methyl
  misc_feature (19)..(19): 2'-deoxy-2'Fluoro
  misc_feature (1). .(19): ribonucleotide unmodified or modified as described for this sequence
ggucgaggagcuggugugutt

SEQ ID NO: 2877 - DNA, 21 bp, Artificial Sequence
  Description of Artificial Sequence: Target Sequence/siNA antisense region (stab22)
  misc_feature (21)..(21): 3'-3 attached terminal deoxyabasic moiety, inverted abasic, inverted nucleotide or other terminal cap that is optionally present
  misc_feature (20)..(20): Phosphorothioate or Phosphorodithioate 3'-Internucleotide Linkage (optionally present)
  misc_feature (1). .(19): ribonucleotide unmodified or modified as described for this sequence
ggucgaggagcuggugugutt

SEQ ID NO: 2878 - DNA, 21 bp, Artificial Sequence
  Description of Artificial Sequence: Target Sequence/siNA antisense region (stab25)
  misc_feature (4)..(4): 2'-deoxy-2'Fluoro
  misc_feature (5)..(10): 2'-O-methyl
  misc_feature (11)..(12): 2'-deoxy-2'Fluoro
  misc_feature (13)..(14): 2'-O-methyl
  misc_feature (15)..(15): 2'-deoxy-2'Fluoro
  misc_feature (16)..(16): 2'-O-methyl
  misc_feature (17)..(17): 2'-deoxy-2'Fluoro
  misc_feature (18)..(18): 2'-O-methyl
  misc_feature (19)..(19): 2'-deoxy-2'Fluoro
  misc_feature (20)..(20): Phosphorothioate or Phosphorodithioate 3'-Internucleotide Linkage (optionally present)
  misc_feature (1)..(19): ribonucleotide unmodified or modified as described for this sequence
ggucgaggagcuggugugutt

SEQ ID NO: 2879 - RNA, 21 nt, Artificial Sequence
  Description of Artificial Sequence: Target Sequence/siNA antisense region (stab35)
  misc_feature (4)..(4): 2'-deoxy-2'Fluoro
  misc_feature (5)..(10): 2'-O-methyl
  misc_feature (11)..(12): 2'-deoxy-2'Fluoro
  misc_feature (13)..(14): 2'-O-methyl
  misc_feature (15)..(15): 2'-deoxy-2'Fluoro
  misc_feature (16)..(16): 2'-O-methyl
  misc_feature (17)..(17): 2'-deoxy-2'Fluoro
  misc_feature (18)..(18): 2'-O-methyl
  misc_feature (19)..(19): 2'-deoxy-2'Fluoro
  misc_feature (20)..(21): 2'-O-methyl
ggucgaggagcugguguguuu

SEQ ID NO: 2880 - RNA, 21 nt, Artificial Sequence
  Description of Artificial Sequence: Target Sequence/siNA antisense region (stab36)
  misc_feature (4)..(4): 2'-deoxy-2'Fluoro
  misc_feature (5)..(10): 2'-O-methyl
  misc_feature (11)..(12): 2'-deoxy-2'Fluoro
  misc_feature (13)..(14): 2'-O-methyl
  misc_feature (15)..(15): 2'-deoxy-2'Fluoro
  misc_feature (16)..(16): 2'-O-methyl
  misc_feature (17)..(17): 2'-deoxy-2'Fluoro
  misc_feature (18)..(18): 2'-O-methyl
  misc_feature (19)..(19): 2'-deoxy-2'Fluoro
  misc_feature (20)..(21): 2'-O-methyl
ggucgaggagcuggugugucc

SEQ ID NO: 2881 - RNA, 19 nt, Artificial Sequence
  Description of Artificial Sequence: Target Sequence/siNA sense region
cgcagucugaggcggcggg

SEQ ID NO: 2882 - RNA, 19 nt, Artificial Sequence
  Description of Artificial Sequence: Target Sequence/siNA antisense region
cccgccgccucagacugcg

SEQ ID NO: 2883 - DNA, 21 bp, Artificial Sequence
  Description of Artificial Sequence: Target Sequence/siNA sense region (stab00)
  misc_feature (1). .(19): ribonucleotide unmodified or modified as described for this sequence
cgcagucugaggcggcgggtt

SEQ ID NO: 2884 - DNA, 21 bp, Artificial Sequence
  Description of Artificial Sequence: Target Sequence/siNA antisense region (stab00as)
  misc_feature (1). .(19): ribonucleotide unmodified or modified as described for this sequence
cccgccgccucagacugcgtt

SEQ ID NO: 2885 - DNA, 21 bp, Artificial Sequence
  Description of Artificial Sequence: Target Sequence/siNA sense region (stab04)
  misc_feature (1)..(1): 5'-3 attached terminal deoxyabasic moiety, inverted abasic, inverted nucleotide or other terminal cap that is optionally present
  misc_feature (21)..(21): 3'-3 attached terminal deoxyabasic moiety, inverted abasic, inverted nucleotide or other terminal cap that is optionally present
  misc_feature (1)..(1): 2'-deoxy-2'Fluoro
  misc_feature (3)..(3): 2'-deoxy-2'Fluoro
  misc_feature (6)..(8): 2'-deoxy-2'Fluoro
  misc_feature (13)..(13): 2'-deoxy-2'Fluoro
  misc_feature (16)..(16): 2'-deoxy-2'Fluoro
  misc_feature (1)..(19): ribonucleotide unmodified or modified as described for this sequence
cgcagucugaggcggcgggtt

SEQ ID NO: 2886 - DNA, 21 bp, Artificial Sequence
  Description of Artificial Sequence: Target Sequence/siNA antisense region (stab05)
  misc_feature (1)..(3): 2'-deoxy-2'Fluoro
  misc_feature (5)..(6): 2'-deoxy-2'Fluoro
  misc_feature (8)..(11): 2'-deoxy-2'Fluoro
  misc_feature (15)..(16): 2'-deoxy-2'Fluoro
  misc_feature (18)..(18): 2'-deoxy-2'Fluoro
  misc_feature (20)..(20): Phosphorothioate or Phosphorodithioate 3'-Internucleotide Linkage (optionally present)
  misc_feature (1)..(19): ribonucleotide unmodified or modified as described for this sequence
cccgccgccucagacugcgtt

SEQ ID NO: 2887 - DNA, 21 bp, Artificial Sequence
  Description of Artificial Sequence: Target Sequence/siNA sense region (stab07)
  misc_feature (1)..(1): 5'-3 attached terminal deoxyabasic moiety, inverted abasic, inverted nucleotide or other terminal cap that is optionally present
  misc_feature (21)..(21): 3'-3 attached terminal deoxyabasic moiety, inverted abasic, inverted nucleotide or other terminal cap that is optionally present
  misc_feature (1)..(1): 2'-deoxy-2'Fluoro
  misc_feature (3)..(3): 2'-deoxy-2'Fluoro
  misc_feature (6)..(8): 2'-deoxy-2'Fluoro
  misc_feature (13)..(13): 2'-deoxy-2'Fluoro
  misc_feature (16)..(16): 2'-deoxy-2'Fluoro
  misc_feature (1). .(19): ribonucleotide unmodified or modified as described for this sequence
cgcagucugaggcggcgggtt

SEQ ID NO: 2888 - DNA, 21 bp, Artificial Sequence
  Description of Artificial Sequence: Target Sequence/siNA antisense region (stab08)
  misc_feature (1)..(3): 2'-deoxy-2'Fluoro
  misc_feature (4)..(4): 2'-O-methyl
  misc_feature (5)..(6): 2'-deoxy-2'Fluoro
  misc_feature (7)..(7): 2'-O-methyl
  misc_feature (8)..(11): 2'-deoxy-2'Fluoro
  misc_feature (12)..(14): 2'-O-methyl
  misc_feature (15)..(16): 2'-deoxy-2'Fluoro
  misc_feature (17)..(17): 2'-O-methyl
  misc_feature (18)..(18): 2'-deoxy-2'Fluoro
  misc_feature (19)..(19): 2'-O-methyl
  misc_feature (20)..(20): Phosphorothioate or Phosphorodithioate 3'-Internucleotide Linkage (optionally present)
  misc_feature (1). .(19): ribonucleotide unmodified or modified as described for this sequence
cccgccgccucagacugcgtt

SEQ ID NO: 2889 - DNA, 21 bp, Artificial Sequence
  Description of Artificial Sequence: Target Sequence/siNA sense region (stab09)
  misc_feature (1)..(1): 5'-3 attached terminal deoxyabasic moiety, inverted abasic, inverted nucleotide or other terminal cap that is optionally present
  misc_feature (21)..(21): 3'-3 attached terminal deoxyabasic moiety, inverted abasic, inverted nucleotide or other terminal cap that is optionally present
  misc_feature (1). .(19): ribonucleotide unmodified or modified as described for this sequence
cgcagucugaggcggcgggtt

SEQ ID NO: 2890 - DNA, 21 bp, Artificial Sequence
  Description of Artificial Sequence: Target Sequence/siNA antisense region (stab10)
  misc_feature (20)..(20): Phosphorothioate or Phosphorodithioate 3'-Internucleotide Linkage (optionally present)
  misc_feature (1). .(19): ribonucleotide unmodified or modified as described for this sequence
cccgccgccucagacugcgtt

SEQ ID NO: 2891 - DNA, 21 bp, Artificial Sequence
  Description of Artificial Sequence: Target Sequence/siNA antisense region (stab19)
  misc_feature (21)..(21): 3'-3 attached terminal deoxyabasic moiety, inverted abasic, inverted nucleotide or other terminal cap that is optionally present
  misc_feature (1)..(3): 2'-deoxy-2'Fluoro
  misc_feature (4)..(4): 2'-O-methyl
  misc_feature (5)..(6): 2'-deoxy-2'Fluoro
  misc_feature (7)..(7): 2'-O-methyl
  misc_feature (8)..(11): 2'-deoxy-2'Fluoro
  misc_feature (12)..(14): 2'-O-methyl
  misc_feature (15)..(16): 2'-deoxy-2'Fluoro
  misc_feature (17)..(17): 2'-O-methyl
  misc_feature (18)..(18): 2'-deoxy-2'Fluoro
  misc_feature (19)..(19): 2'-O-methyl
  misc_feature (1). .(19): ribonucleotide unmodified or modified as described for this sequence
cccgccgccucagacugcgtt

SEQ ID NO: 2892 - DNA, 21 bp, Artificial Sequence
  Description of Artificial Sequence: Target Sequence/siNA antisense region (stab22)
  misc_feature (21)..(21): 3'-3 attached terminal deoxyabasic moiety, inverted abasic, inverted nucleotide or other terminal cap that is optionally present
  misc_feature (20)..(20): Phosphorothioate or Phosphorodithioate 3'-Internucleotide Linkage (optionally present)
  misc_feature (1). .(19): ribonucleotide unmodified or modified as described for this sequence
cccgccgccucagacugcgtt

SEQ ID NO: 2893 - DNA, 21 bp, Artificial Sequence
  Description of Artificial Sequence: Target Sequence/siNA antisense region (stab25)
  misc_feature (4)..(4): 2'-O-methyl
  misc_feature (5)..(6): 2'-deoxy-2'Fluoro
  misc_feature (7)..(7): 2'-O-methyl
  misc_feature (8)..(11): 2'-deoxy-2'Fluoro
  misc_feature (12)..(14): 2'-O-methyl
  misc_feature (15)..(16): 2'-deoxy-2'Fluoro
  misc_feature (17)..(17): 2'-O-methyl
  misc_feature (18)..(18): 2'-deoxy-2'Fluoro
  misc_feature (19)..(19): 2'-O-methyl
  misc_feature (20)..(20): Phosphorothioate or Phosphorodithioate 3'-Internucleotide Linkage (optionally present)
  misc_feature (1)..(19): ribonucleotide unmodified or modified as described for this sequence
cccgccgccucagacugcgtt

SEQ ID NO: 2894 - RNA, 21 nt, Artificial Sequence
  Description of Artificial Sequence: Target Sequence/siNA antisense region (stab35)
  misc_feature (4)..(4): 2'-O-methyl
  misc_feature (5)..(6): 2'-deoxy-2'Fluoro
  misc_feature (7)..(7): 2'-O-methyl
  misc_feature (8)..(11): 2'-deoxy-2'Fluoro
  misc_feature (12)..(14): 2'-O-methyl
  misc_feature (15)..(16): 2'-deoxy-2'Fluoro
  misc_feature (17)..(17): 2'-O-methyl
  misc_feature (18)..(18): 2'-deoxy-2'Fluoro
  misc_feature (19)..(21): 2'-O-methyl
cccgccgccucagacugcguu

SEQ ID NO: 2895 - RNA, 21 nt, Artificial Sequence
  Description of Artificial Sequence: Target Sequence/siNA antisense region (stab36)
  misc_feature (4)..(4): 2'-O-methyl
  misc_feature (5)..(6): 2'-deoxy-2'Fluoro
  misc_feature (7)..(7): 2'-O-methyl
  misc_feature (8)..(11): 2'-deoxy-2'Fluoro
  misc_feature (12)..(14): 2'-O-methyl
  misc_feature (15)..(16): 2'-deoxy-2'Fluoro
  misc_feature (17)..(17): 2'-O-methyl
  misc_feature (18)..(18): 2'-deoxy-2'Fluoro
  misc_feature (19)..(21): 2'-O-methyl
cccgccgccucagacugcggu

SEQ ID NO: 2896 - RNA, 19 nt, Artificial Sequence
  Description of Artificial Sequence: Target Sequence/siNA sense region
gcaggccccgguggcaaag

SEQ ID NO: 2897 - RNA, 19 nt, Artificial Sequence
  Description of Artificial Sequence: Target Sequence/siNA antisense region
cuuugccaccggggccugc

SEQ ID NO: 2898 - DNA, 21 bp, Artificial Sequence
  Description of Artificial Sequence: Target Sequence/siNA sense region (stab00)
  misc_feature (1). .(19): ribonucleotide unmodified or modified as described for this sequence
gcaggccccgguggcaaagtt

SEQ ID NO: 2899 - DNA, 21 bp, Artificial Sequence
  Description of Artificial Sequence: Target Sequence/siNA antisense region (stab00as)
  misc_feature (1). .(19): ribonucleotide unmodified or modified as described for this sequence
cuuugccaccggggccugctt

SEQ ID NO: 2900 - DNA, 21 bp, Artificial Sequence
  Description of Artificial Sequence: Target Sequence/siNA sense region (stab04)
  misc_feature (1)..(1): 5'-3 attached terminal deoxyabasic moiety, inverted abasic, inverted nucleotide or other terminal cap that is optionally present
  misc_feature (21)..(21): 3'-3 attached terminal deoxyabasic moiety, inverted abasic, inverted nucleotide or other terminal cap that is optionally present
  misc_feature (2)..(2): 2'-deoxy-2'Fluoro
  misc_feature (6)..(9): 2'-deoxy-2'Fluoro
  misc_feature (12)..(12): 2'-deoxy-2'Fluoro
  misc_feature (15)..(15): 2'-deoxy-2'Fluoro
  misc_feature (1)..(19): ribonucleotide unmodified or modified as described for this sequence
gcaggccccgguggcaaagtt

SEQ ID NO: 2901 - DNA, 21 bp, Artificial Sequence
  Description of Artificial Sequence: Target Sequence/siNA antisense region (stab05)
  misc_feature (1)..(4): 2'-deoxy-2'Fluoro
  misc_feature (6)..(7): 2'-deoxy-2'Fluoro
  misc_feature (9)..(10): 2'-deoxy-2'Fluoro
  misc_feature (15)..(17): 2'-deoxy-2'Fluoro
  misc_feature (19)..(19): 2'-deoxy-2'Fluoro
  misc_feature (20)..(20): Phosphorothioate or Phosphorodithioate 3'-Internucleotide Linkage (optionally present)
  misc_feature (1)..(19): ribonucleotide unmodified or modified as described for this sequence
cuuugccaccggggccugctt

SEQ ID NO: 2902 - DNA, 21 bp, Artificial Sequence
  Description of Artificial Sequence: Target Sequence/siNA sense region (stab07)
  misc_feature (1)..(1): 5'-3 attached terminal deoxyabasic moiety, inverted abasic, inverted nucleotide or other terminal cap that is optionally present
  misc_feature (21)..(21): 3'-3 attached terminal deoxyabasic moiety, inverted abasic, inverted nucleotide or other terminal cap that is optionally present
  misc_feature (2)..(2): 2'-deoxy-2'Fluoro
  misc_feature (6)..(9): 2'-deoxy-2'Fluoro
  misc_feature (12)..(12): 2'-deoxy-2'Fluoro
  misc_feature (15)..(15): 2'-deoxy-2'Fluoro
  misc_feature (1). .(19): ribonucleotide unmodified or modified as described for this sequence
gcaggccccgguggcaaagtt

SEQ ID NO: 2903 - DNA, 21 bp, Artificial Sequence
  Description of Artificial Sequence: Target Sequence/siNA antisense region (stab08)
  misc_feature (1)..(4): 2'-deoxy-2'Fluoro
  misc_feature (5)..(5): 2'-O-methyl
  misc_feature (6)..(7): 2'-deoxy-2'Fluoro
  misc_feature (8)..(8): 2'-O-methyl
  misc_feature (9)..(10): 2'-deoxy-2'Fluoro
  misc_feature (11)..(14): 2'-O-methyl
  misc_feature (15)..(17): 2'-deoxy-2'Fluoro
  misc_feature (18)..(18): 2'-O-methyl
  misc_feature (19)..(19): 2'-deoxy-2'Fluoro
  misc_feature (20)..(20): Phosphorothioate or Phosphorodithioate 3'-Internucleotide Linkage (optionally present)
  misc_feature (1). .(19): ribonucleotide unmodified or modified as described for this sequence
cuuugccaccggggccugctt

SEQ ID NO: 2904 - DNA, 21 bp, Artificial Sequence
  Description of Artificial Sequence: Target Sequence/siNA sense region (stab09)
  misc_feature (1)..(1): 5'-3 attached terminal deoxyabasic moiety, inverted abasic, inverted nucleotide or other terminal cap that is optionally present
  misc_feature (21)..(21): 3'-3 attached terminal deoxyabasic moiety, inverted abasic, inverted nucleotide or other terminal cap that is optionally present
  misc_feature (1). .(19): ribonucleotide unmodified or modified as described for this sequence
gcaggccccgguggcaaagtt

SEQ ID NO: 2905 - DNA, 21 bp, Artificial Sequence
  Description of Artificial Sequence: Target Sequence/siNA antisense region (stab10)
  misc_feature (20)..(20): Phosphorothioate or Phosphorodithioate 3'-Internucleotide Linkage (optionally present)
  misc_feature (1). .(19): ribonucleotide unmodified or modified as described for this sequence
cuuugccaccggggccugctt

SEQ ID NO: 2906 - DNA, 21 bp, Artificial Sequence
  Description of Artificial Sequence: Target Sequence/siNA antisense region (stab19)
  misc_feature (21)..(21): 3'-3 attached terminal deoxyabasic moiety, inverted abasic, inverted nucleotide or other terminal cap that is optionally present
  misc_feature (1)..(4): 2'-deoxy-2'Fluoro
  misc_feature (5)..(5): 2'-O-methyl
  misc_feature (6)..(7): 2'-deoxy-2'Fluoro
  misc_feature (8)..(8): 2'-O-methyl
  misc_feature (9)..(10): 2'-deoxy-2'Fluoro
  misc_feature (11)..(14): 2'-O-methyl
  misc_feature (15)..(17): 2'-deoxy-2'Fluoro
  misc_feature (18)..(18): 2'-O-methyl
  misc_feature (19)..(19): 2'-deoxy-2'Fluoro
  misc_feature (1). .(19): ribonucleotide unmodified or modified as described for this sequence
cuuugccaccggggccugctt

SEQ ID NO: 2907 - DNA, 21 bp, Artificial Sequence
  Description of Artificial Sequence: Target Sequence/siNA antisense region (stab22)
  misc_feature (21)..(21): 3'-3 attached terminal deoxyabasic moiety, inverted abasic, inverted nucleotide or other terminal cap that is optionally present
  misc_feature (20)..(20): Phosphorothioate or Phosphorodithioate 3'-Internucleotide Linkage (optionally present)
  misc_feature (1). .(19): ribonucleotide unmodified or modified as described for this sequence
cuuugccaccggggccugctt

SEQ ID NO: 2908 - DNA, 21 bp, Artificial Sequence
  Description of Artificial Sequence: Target Sequence/siNA antisense region (stab25)
  misc_feature (4)..(4): 2'-deoxy-2'Fluoro
  misc_feature (5)..(5): 2'-O-methyl
  misc_feature (6)..(7): 2'-deoxy-2'Fluoro
  misc_feature (8)..(8): 2'-O-methyl
  misc_feature (9)..(10): 2'-deoxy-2'Fluoro
  misc_feature (11)..(14): 2'-O-methyl
  misc_feature (15)..(17): 2'-deoxy-2'Fluoro
  misc_feature (18)..(18): 2'-O-methyl
  misc_feature (19)..(19): 2'-deoxy-2'Fluoro
  misc_feature (20)..(20): Phosphorothioate or Phosphorodithioate 3'-Internucleotide Linkage (optionally present)
  misc_feature (1)..(19): ribonucleotide unmodified or modified as described for this sequence
cuuugccaccggggccugctt

SEQ ID NO: 2909 - RNA, 21 nt, Artificial Sequence
  Description of Artificial Sequence: Target Sequence/siNA antisense region (stab35)
  misc_feature (4)..(4): 2'-deoxy-2'Fluoro
  misc_feature (5)..(5): 2'-O-methyl
  misc_feature (6)..(7): 2'-deoxy-2'Fluoro
  misc_feature (8)..(8): 2'-O-methyl
  misc_feature (9)..(10): 2'-deoxy-2'Fluoro
  misc_feature (11)..(14): 2'-O-methyl
  misc_feature (15)..(17): 2'-deoxy-2'Fluoro
  misc_feature (18)..(18): 2'-O-methyl
  misc_feature (19)..(19): 2'-deoxy-2'Fluoro
  misc_feature (20)..(21): 2'-O-methyl
cuuugccaccggggccugcuu

SEQ ID NO: 2910 - RNA, 21 nt, Artificial Sequence
  Description of Artificial Sequence: Target Sequence/siNA antisense region (stab36)
  misc_feature (4)..(4): 2'-deoxy-2'Fluoro
  misc_feature (5)..(5): 2'-O-methyl
  misc_feature (6)..(7): 2'-deoxy-2'Fluoro
  misc_feature (8)..(8): 2'-O-methyl
  misc_feature (9)..(10): 2'-deoxy-2'Fluoro
  misc_feature (11)..(14): 2'-O-methyl
  misc_feature (15)..(17): 2'-deoxy-2'Fluoro
  misc_feature (18)..(18): 2'-O-methyl
  misc_feature (19)..(19): 2'-deoxy-2'Fluoro
  misc_feature (20)..(21): 2'-O-methyl
cuuugccaccggggccugccc

SEQ ID NO: 2911 - RNA, 19 nt, Artificial Sequence
  Description of Artificial Sequence: Target Sequence/siNA sense region
ggaggcgcgguggcggagc

SEQ ID NO: 2912 - RNA, 19 nt, Artificial Sequence
  Description of Artificial Sequence: Target Sequence/siNA antisense region
gcuccgccaccgcgccucc

SEQ ID NO: 2913 - DNA, 21 bp, Artificial Sequence
  Description of Artificial Sequence: Target Sequence/siNA sense region (stab00)
  misc_feature (1). .(19): ribonucleotide unmodified or modified as described for this sequence
ggaggcgcgguggcggagctt

SEQ ID NO: 2914 - DNA, 21 bp, Artificial Sequence
  Description of Artificial Sequence: Target Sequence/siNA antisense region (stab00as)
  misc_feature (1). .(19): ribonucleotide unmodified or modified as described for this sequence
gcuccgccaccgcgccucctt

SEQ ID NO: 2915 - DNA, 21 bp, Artificial Sequence
  Description of Artificial Sequence: Target Sequence/siNA sense region (stab04)
  misc_feature (1)..(1): 5'-3 attached terminal deoxyabasic moiety, inverted abasic, inverted nucleotide or other terminal cap that is optionally present
  misc_feature (21)..(21): 3'-3 attached terminal deoxyabasic moiety, inverted abasic, inverted nucleotide or other terminal cap that is optionally present
  misc_feature (6)..(6): 2'-deoxy-2'Fluoro
  misc_feature (8)..(8): 2'-deoxy-2'Fluoro
  misc_feature (11)..(11): 2'-deoxy-2'Fluoro
  misc_feature (14)..(14): 2'-deoxy-2'Fluoro
  misc_feature (19)..(19): 2'-deoxy-2'Fluoro
  misc_feature (1)..(19): ribonucleotide unmodified or modified as described for this sequence
ggaggcgcgguggcggagctt

SEQ ID NO: 2916 - DNA, 21 bp, Artificial Sequence
  Description of Artificial Sequence: Target Sequence/siNA antisense region (stab05)
  misc_feature (2)..(5): 2'-deoxy-2'Fluoro
  misc_feature (7)..(8): 2'-deoxy-2'Fluoro
  misc_feature (10)..(11): 2'-deoxy-2'Fluoro
  misc_feature (13)..(13): 2'-deoxy-2'Fluoro
  misc_feature (15)..(19): 2'-deoxy-2'Fluoro
  misc_feature (20)..(20): Phosphorothioate or Phosphorodithioate 3'-Internucleotide Linkage (optionally present)
  misc_feature (1)..(19): ribonucleotide unmodified or modified as described for this sequence
gcuccgccaccgcgccucctt

SEQ ID NO: 2917 - DNA, 21 bp, Artificial Sequence
  Description of Artificial Sequence: Target Sequence/siNA sense region (stab07)
  misc_feature (1)..(1): 5'-3 attached terminal deoxyabasic moiety, inverted abasic, inverted nucleotide or other terminal cap that is optionally present
  misc_feature (21)..(21): 3'-3 attached terminal deoxyabasic moiety, inverted abasic, inverted nucleotide or other terminal cap that is optionally present
  misc_feature (6)..(6): 2'-deoxy-2'Fluoro
  misc_feature (8)..(8): 2'-deoxy-2'Fluoro
  misc_feature (11)..(11): 2'-deoxy-2'Fluoro
  misc_feature (14)..(14): 2'-deoxy-2'Fluoro
  misc_feature (19)..(19): 2'-deoxy-2'Fluoro
  misc_feature (1). .(19): ribonucleotide unmodified or modified as described for this sequence
ggaggcgcgguggcggagctt

SEQ ID NO: 2918 - DNA, 21 bp, Artificial Sequence
  Description of Artificial Sequence: Target Sequence/siNA antisense region (stab08)
  misc_feature (1)..(1): 2'-O-methyl
  misc_feature (2)..(5): 2'-deoxy-2'Fluoro
  misc_feature (6)..(6): 2'-O-methyl
  misc_feature (7)..(8): 2'-deoxy-2'Fluoro
  misc_feature (9)..(9): 2'-O-methyl
  misc_feature (10)..(11): 2'-deoxy-2'Fluoro
  misc_feature (12)..(12): 2'-O-methyl
  misc_feature (13)..(13): 2'-deoxy-2'Fluoro
  misc_feature (14)..(14): 2'-O-methyl
  misc_feature (15)..(19): 2'-deoxy-2'Fluoro
  misc_feature (20)..(20): Phosphorothioate or Phosphorodithioate 3'-Internucleotide Linkage (optionally present)
  misc_feature (1). .(19): ribonucleotide unmodified or modified as described for this sequence
gcuccgccaccgcgccucctt

SEQ ID NO: 2919 - DNA, 21 bp, Artificial Sequence
  Description of Artificial Sequence: Target Sequence/siNA sense region (stab09)
  misc_feature (1)..(1): 5'-3 attached terminal deoxyabasic moiety, inverted abasic, inverted nucleotide or other terminal cap that is optionally present
  misc_feature (21)..(21): 3'-3 attached terminal deoxyabasic moiety, inverted abasic, inverted nucleotide or other terminal cap that is optionally present
  misc_feature (1). .(19): ribonucleotide unmodified or modified as described for this sequence
ggaggcgcgguggcggagctt

SEQ ID NO: 2920 - DNA, 21 bp, Artificial Sequence
  Description of Artificial Sequence: Target Sequence/siNA antisense region (stab10)
  misc_feature (20)..(20): Phosphorothioate or Phosphorodithioate 3'-Internucleotide Linkage (optionally present)
  misc_feature (1). .(19): ribonucleotide unmodified or modified as described for this sequence
gcuccgccaccgcgccucctt

SEQ ID NO: 2921 - DNA, 21 bp, Artificial Sequence
  Description of Artificial Sequence: Target Sequence/siNA antisense region (stab19)
  misc_feature (21)..(21): 3'-3 attached terminal deoxyabasic moiety, inverted abasic, inverted nucleotide or other terminal cap that is optionally present
  misc_feature (1)..(1): 2'-O-methyl
  misc_feature (2)..(5): 2'-deoxy-2'Fluoro
  misc_feature (6)..(6): 2'-O-methyl
  misc_feature (7)..(8): 2'-deoxy-2'Fluoro
  misc_feature (9)..(9): 2'-O-methyl
  misc_feature (10)..(11): 2'-deoxy-2'Fluoro
  misc_feature (12)..(12): 2'-O-methyl
  misc_feature (13)..(13): 2'-deoxy-2'Fluoro
  misc_feature (14)..(14): 2'-O-methyl
  misc_feature (15)..(19): 2'-deoxy-2'Fluoro
  misc_feature (1). .(19): ribonucleotide unmodified or modified as described for this sequence
gcuccgccaccgcgccucctt

SEQ ID NO: 2922 - DNA, 21 bp, Artificial Sequence
  Description of Artificial Sequence: Target Sequence/siNA antisense region (stab22)
  misc_feature (21)..(21): 3'-3 attached terminal deoxyabasic moiety, inverted abasic, inverted nucleotide or other terminal cap that is optionally present
  misc_feature (20)..(20): Phosphorothioate or Phosphorodithioate 3'-Internucleotide Linkage (optionally present)
  misc_feature (1). .(19): ribonucleotide unmodified or modified as described for this sequence
gcuccgccaccgcgccucctt

SEQ ID NO: 2923 - DNA, 21 bp, Artificial Sequence
  Description of Artificial Sequence: Target Sequence/siNA antisense region (stab25)
  misc_feature (4)..(5): 2'-deoxy-2'Fluoro
  misc_feature (6)..(6): 2'-O-methyl
  misc_feature (7)..(8): 2'-deoxy-2'Fluoro
  misc_feature (9)..(9): 2'-O-methyl
  misc_feature (10)..(11): 2'-deoxy-2'Fluoro
  misc_feature (12)..(12): 2'-O-methyl
  misc_feature (13)..(13): 2'-deoxy-2'Fluoro
  misc_feature (14)..(14): 2'-O-methyl
  misc_feature (15)..(19): 2'-deoxy-2'Fluoro
  misc_feature (20)..(20): Phosphorothioate or Phosphorodithioate 3'-Internucleotide Linkage (optionally present)
  misc_feature (1)..(19): ribonucleotide unmodified or modified as described for this sequence
gcuccgccaccgcgccucctt

SEQ ID NO: 2924 - RNA, 21 nt, Artificial Sequence
  Description of Artificial Sequence: Target Sequence/siNA antisense region (stab35)
  misc_feature (4)..(5): 2'-deoxy-2'Fluoro
  misc_feature (6)..(6): 2'-O-methyl
  misc_feature (7)..(8): 2'-deoxy-2'Fluoro
  misc_feature (9)..(9): 2'-O-methyl
  misc_feature (10)..(11): 2'-deoxy-2'Fluoro
  misc_feature (12)..(12): 2'-O-methyl
  misc_feature (13)..(13): 2'-deoxy-2'Fluoro
  misc_feature (14)..(14): 2'-O-methyl
  misc_feature (15)..(19): 2'-deoxy-2'Fluoro
  misc_feature (20)..(21): 2'-O-methyl
gcuccgccaccgcgccuccuu

SEQ ID NO: 2925 - RNA, 21 nt, Artificial Sequence
  Description of Artificial Sequence: Target Sequence/siNA antisense region (stab36)
  misc_feature (4)..(5): 2'-deoxy-2'Fluoro
  misc_feature (6)..(6): 2'-O-methyl
  misc_feature (7)..(8): 2'-deoxy-2'Fluoro
  misc_feature (9)..(9): 2'-O-methyl
  misc_feature (10)..(11): 2'-deoxy-2'Fluoro
  misc_feature (12)..(12): 2'-O-methyl
  misc_feature (13)..(13): 2'-deoxy-2'Fluoro
  misc_feature (14)..(14): 2'-O-methyl
  misc_feature (15)..(19): 2'-deoxy-2'Fluoro
  misc_feature (20)..(21): 2'-O-methyl
gcuccgccaccgcgccuccuu

SEQ ID NO: 2926 - RNA, 19 nt, Artificial Sequence
  Description of Artificial Sequence: Target Sequence/siNA sense region
cuggagccgcggcccacgc

SEQ ID NO: 2927 - RNA, 19 nt, Artificial Sequence
  Description of Artificial Sequence: Target Sequence/siNA antisense region
gcgugggccgcggcuccag

SEQ ID NO: 2928 - DNA, 21 bp, Artificial Sequence
  Description of Artificial Sequence: Target Sequence/siNA sense region (stab00)
  misc_feature (1). .(19): ribonucleotide unmodified or modified as described for this sequence
cuggagccgcggcccacgctt

SEQ ID NO: 2929 - DNA, 21 bp, Artificial Sequence
  Description of Artificial Sequence: Target Sequence/siNA antisense region (stab00as)
  misc_feature (1). .(19): ribonucleotide unmodified or modified as described for this sequence
gcgugggccgcggcuccagtt

SEQ ID NO: 2930 - DNA, 21 bp, Artificial Sequence
  Description of Artificial Sequence: Target Sequence/siNA sense region (stab04)
  misc_feature (1)..(1): 5'-3 attached terminal deoxyabasic moiety, inverted abasic, inverted nucleotide or other terminal cap that is optionally present
  misc_feature (21)..(21): 3'-3 attached terminal deoxyabasic moiety, inverted abasic, inverted nucleotide or other terminal cap that is optionally present
  misc_feature (1)..(2): 2'-deoxy-2'Fluoro
  misc_feature (7)..(8): 2'-deoxy-2'Fluoro
  misc_feature (10)..(10): 2'-deoxy-2'Fluoro
  misc_feature (13)..(15): 2'-deoxy-2'Fluoro
  misc_feature (17)..(17): 2'-deoxy-2'Fluoro
  misc_feature (19)..(19): 2'-deoxy-2'Fluoro
  misc_feature (1)..(19): ribonucleotide unmodified or modified as described for this sequence
cuggagccgcggcccacgctt

SEQ ID NO: 2931 - DNA, 21 bp, Artificial Sequence
  Description of Artificial Sequence: Target Sequence/siNA antisense region (stab05)
  misc_feature (2)..(2): 2'-deoxy-2'Fluoro
  misc_feature (4)..(4): 2'-deoxy-2'Fluoro
  misc_feature (8)..(9): 2'-deoxy-2'Fluoro
  misc_feature (11)..(11): 2'-deoxy-2'Fluoro
  misc_feature (14)..(17): 2'-deoxy-2'Fluoro
  misc_feature (20)..(20): Phosphorothioate or Phosphorodithioate 3'-Internucleotide Linkage (optionally present)
  misc_feature (1)..(19): ribonucleotide unmodified or modified as described for this sequence
gcgugggccgcggcuccagtt

SEQ ID NO: 2932 - DNA, 21 bp, Artificial Sequence
  Description of Artificial Sequence: Target Sequence/siNA sense region (stab07)
  misc_feature (1)..(1): 5'-3 attached terminal deoxyabasic moiety, inverted abasic, inverted nucleotide or other terminal cap that is optionally present
  misc_feature (21)..(21): 3'-3 attached terminal deoxyabasic moiety, inverted abasic, inverted nucleotide or other terminal cap that is optionally present
  misc_feature (1)..(2): 2'-deoxy-2'Fluoro
  misc_feature (7)..(8): 2'-deoxy-2'Fluoro
  misc_feature (10)..(10): 2'-deoxy-2'Fluoro
  misc_feature (13)..(15): 2'-deoxy-2'Fluoro
  misc_feature (17)..(17): 2'-deoxy-2'Fluoro
  misc_feature (19)..(19): 2'-deoxy-2'Fluoro
  misc_feature (1). .(19): ribonucleotide unmodified or modified as described for this sequence
cuggagccgcggcccacgctt

SEQ ID NO: 2933 - DNA, 21 bp, Artificial Sequence
  Description of Artificial Sequence: Target Sequence/siNA antisense region (stab08)
  misc_feature (1)..(1): 2'-O-methyl
  misc_feature (2)..(2): 2'-deoxy-2'Fluoro
  misc_feature (3)..(3): 2'-O-methyl
  misc_feature (4)..(4): 2'-deoxy-2'Fluoro
  misc_feature (5)..(7): 2'-O-methyl
  misc_feature (8)..(9): 2'-deoxy-2'Fluoro
  misc_feature (10)..(10): 2'-O-methyl
  misc_feature (11)..(11): 2'-deoxy-2'Fluoro
  misc_feature (12)..(13): 2'-O-methyl
  misc_feature (14)..(17): 2'-deoxy-2'Fluoro
  misc_feature (18)..(19): 2'-O-methyl
  misc_feature (20)..(20): Phosphorothioate or Phosphorodithioate 3'-Internucleotide Linkage (optionally present)
  misc_feature (1). .(19): ribonucleotide unmodified or modified as described for this sequence
gcgugggccgcggcuccagtt

SEQ ID NO: 2934 - DNA, 21 bp, Artificial Sequence
  Description of Artificial Sequence: Target Sequence/siNA sense region (stab09)
  misc_feature (1)..(1): 5'-3 attached terminal deoxyabasic moiety, inverted abasic, inverted nucleotide or other terminal cap that is optionally present
  misc_feature (21)..(21): 3'-3 attached terminal deoxyabasic moiety, inverted abasic, inverted nucleotide or other terminal cap that is optionally present
  misc_feature (1). .(19): ribonucleotide unmodified or modified as described for this sequence
cuggagccgcggcccacgctt

SEQ ID NO: 2935 - DNA, 21 bp, Artificial Sequence
  Description of Artificial Sequence: Target Sequence/siNA antisense region (stab10)
  misc_feature (20)..(20): Phosphorothioate or Phosphorodithioate 3'-Internucleotide Linkage (optionally present)
  misc_feature (1). .(19): ribonucleotide unmodified or modified as described for this sequence
gcgugggccgcggcuccagtt

SEQ ID NO: 2936 - DNA, 21 bp, Artificial Sequence
  Description of Artificial Sequence: Target Sequence/siNA antisense region (stab19)
  misc_feature (21)..(21): 3'-3 attached terminal deoxyabasic moiety, inverted abasic, inverted nucleotide or other terminal cap that is optionally present
  misc_feature (1)..(1): 2'-O-methyl
  misc_feature (2)..(2): 2'-deoxy-2'Fluoro
  misc_feature (3)..(3): 2'-O-methyl
  misc_feature (4)..(4): 2'-deoxy-2'Fluoro
  misc_feature (5)..(7): 2'-O-methyl
  misc_feature (8)..(9): 2'-deoxy-2'Fluoro
  misc_feature (10)..(10): 2'-O-methyl
  misc_feature (11)..(11): 2'-deoxy-2'Fluoro
  misc_feature (12)..(13): 2'-O-methyl
  misc_feature (14)..(17): 2'-deoxy-2'Fluoro
  misc_feature (18)..(19): 2'-O-methyl
  misc_feature (1). .(19): ribonucleotide unmodified or modified as described for this sequence
gcgugggccgcggcuccagtt

SEQ ID NO: 2937 - DNA, 21 bp, Artificial Sequence
  Description of Artificial Sequence: Target Sequence/siNA antisense region (stab22)
  misc_feature (21)..(21): 3'-3 attached terminal deoxyabasic moiety, inverted abasic, inverted nucleotide or other terminal cap that is optionally present
  misc_feature (20)..(20): Phosphorothioate or Phosphorodithioate 3'-Internucleotide Linkage (optionally present)
  misc_feature (1). .(19): ribonucleotide unmodified or modified as described for this sequence
gcgugggccgcggcuccagtt

SEQ ID NO: 2938 - DNA, 21 bp, Artificial Sequence
  Description of Artificial Sequence: Target Sequence/siNA antisense region (stab25)
  misc_feature (4)..(4): 2'-deoxy-2'Fluoro
  misc_feature (5)..(7): 2'-O-methyl
  misc_feature (8)..(9): 2'-deoxy-2'Fluoro
  misc_feature (10)..(10): 2'-O-methyl
  misc_feature (11)..(11): 2'-deoxy-2'Fluoro
  misc_feature (12)..(13): 2'-O-methyl
  misc_feature (14)..(17): 2'-deoxy-2'Fluoro
  misc_feature (18)..(19): 2'-O-methyl
  misc_feature (20)..(20): Phosphorothioate or Phosphorodithioate 3'-Internucleotide Linkage (optionally present)
  misc_feature (1)..(19): ribonucleotide unmodified or modified as described for this sequence
gcgugggccgcggcuccagtt

SEQ ID NO: 2939 - RNA, 21 nt, Artificial Sequence
  Description of Artificial Sequence: Target Sequence/siNA antisense region (stab35)
  misc_feature (4)..(4): 2'-deoxy-2'Fluoro
  misc_feature (5)..(7): 2'-O-methyl
  misc_feature (8)..(9): 2'-deoxy-2'Fluoro
  misc_feature (10)..(10): 2'-O-methyl
  misc_feature (11)..(11): 2'-deoxy-2'Fluoro
  misc_feature (12)..(13): 2'-O-methyl
  misc_feature (14)..(17): 2'-deoxy-2'Fluoro
  misc_feature (18)..(21): 2'-O-methyl
gcgugggccgcggcuccaguu

SEQ ID NO: 2940 - RNA, 21 nt, Artificial Sequence
  Description of Artificial Sequence: Target Sequence/siNA antisense region (stab36)
  misc_feature (4)..(4): 2'-deoxy-2'Fluoro
  misc_feature (5)..(7): 2'-O-methyl
  misc_feature (8)..(9): 2'-deoxy-2'Fluoro
  misc_feature (10)..(10): 2'-O-methyl
  misc_feature (11)..(11): 2'-deoxy-2'Fluoro
  misc_feature (12)..(13): 2'-O-methyl
  misc_feature (14)..(17): 2'-deoxy-2'Fluoro
  misc_feature (18)..(21): 2'-O-methyl
gcgugggccgcggcuccagcu

SEQ ID NO: 2941 - RNA, 19 nt, Artificial Sequence
  Description of Artificial Sequence: Target Sequence/siNA sense region
cggcgggagcacgcggagg

SEQ ID NO: 2942 - RNA, 19 nt, Artificial Sequence
  Description of Artificial Sequence: Target Sequence/siNA antisense region
ccuccgcgugcucccgccg

SEQ ID NO: 2943 - DNA, 21 bp, Artificial Sequence
  Description of Artificial Sequence: Target Sequence/siNA sense region (stab00)
  misc_feature (1). .(19): ribonucleotide unmodified or modified as described for this sequence
cggcgggagcacgcggaggtt

SEQ ID NO: 2944 - DNA, 21 bp, Artificial Sequence
  Description of Artificial Sequence: Target Sequence/siNA antisense region (stab00as)
  misc_feature (1). .(19): ribonucleotide unmodified or modified as described for this sequence
ccuccgcgugcucccgccgtt

SEQ ID NO: 2945 - DNA, 21 bp, Artificial Sequence
  Description of Artificial Sequence: Target Sequence/siNA sense region (stab04)
  misc_feature (1)..(1): 5'-3 attached terminal deoxyabasic moiety, inverted abasic, inverted nucleotide or other terminal cap that is optionally present
  misc_feature (21)..(21): 3'-3 attached terminal deoxyabasic moiety, inverted abasic, inverted nucleotide or other terminal cap that is optionally present
  misc_feature (1)..(1): 2'-deoxy-2'Fluoro
  misc_feature (4)..(4): 2'-deoxy-2'Fluoro
  misc_feature (10)..(10): 2'-deoxy-2'Fluoro
  misc_feature (12)..(12): 2'-deoxy-2'Fluoro
  misc_feature (14)..(14): 2'-deoxy-2'Fluoro
  misc_feature (1)..(19): ribonucleotide unmodified or modified as described for this sequence
cggcgggagcacgcggaggtt

SEQ ID NO: 2946 - DNA, 21 bp, Artificial Sequence
  Description of Artificial Sequence: Target Sequence/siNA antisense region (stab05)
  misc_feature (1)..(5): 2'-deoxy-2'Fluoro
  misc_feature (7)..(7): 2'-deoxy-2'Fluoro
  misc_feature (9)..(9): 2'-deoxy-2'Fluoro
  misc_feature (11)..(15): 2'-deoxy-2'Fluoro
  misc_feature (17)..(18): 2'-deoxy-2'Fluoro
  misc_feature (20)..(20): Phosphorothioate or Phosphorodithioate 3'-Internucleotide Linkage (optionally present)
  misc_feature (1)..(19): ribonucleotide unmodified or modified as described for this sequence
ccuccgcgugcucccgccgtt

SEQ ID NO: 2947 - DNA, 21 bp, Artificial Sequence
  Description of Artificial Sequence: Target Sequence/siNA sense region (stab07)
  misc_feature (1)..(1): 5'-3 attached terminal deoxyabasic moiety, inverted abasic, inverted nucleotide or other terminal cap that is optionally present
  misc_feature (21)..(21): 3'-3 attached terminal deoxyabasic moiety, inverted abasic, inverted nucleotide or other terminal cap that is optionally present
  misc_feature (1)..(1): 2'-deoxy-2'Fluoro
  misc_feature (4)..(4): 2'-deoxy-2'Fluoro
  misc_feature (10)..(10): 2'-deoxy-2'Fluoro
  misc_feature (12)..(12): 2'-deoxy-2'Fluoro
  misc_feature (14)..(14): 2'-deoxy-2'Fluoro
  misc_feature (1). .(19): ribonucleotide unmodified or modified as described for this sequence
cggcgggagcacgcggaggtt

SEQ ID NO: 2948 - DNA, 21 bp, Artificial Sequence
  Description of Artificial Sequence: Target Sequence/siNA antisense region (stab08)
  misc_feature (1)..(5): 2'-deoxy-2'Fluoro
  misc_feature (6)..(6): 2'-O-methyl
  misc_feature (7)..(7): 2'-deoxy-2'Fluoro
  misc_feature (8)..(8): 2'-O-methyl
  misc_feature (9)..(9): 2'-deoxy-2'Fluoro
  misc_feature (10)..(10): 2'-O-methyl
  misc_feature (11)..(15): 2'-deoxy-2'Fluoro
  misc_feature (16)..(16): 2'-O-methyl
  misc_feature (17)..(18): 2'-deoxy-2'Fluoro
  misc_feature (19)..(19): 2'-O-methyl
  misc_feature (20)..(20): Phosphorothioate or Phosphorodithioate 3'-Internucleotide Linkage (optionally present)
  misc_feature (1). .(19): ribonucleotide unmodified or modified as described for this sequence
ccuccgcgugcucccgccgtt

SEQ ID NO: 2949 - DNA, 21 bp, Artificial Sequence
  Description of Artificial Sequence: Target Sequence/siNA sense region (stab09)
  misc_feature (1)..(1): 5'-3 attached terminal deoxyabasic moiety, inverted abasic, inverted nucleotide or other terminal cap that is optionally present
  misc_feature (21)..(21): 3'-3 attached terminal deoxyabasic moiety, inverted abasic, inverted nucleotide or other terminal cap that is optionally present
  misc_feature (1). .(19): ribonucleotide unmodified or modified as described for this sequence
cggcgggagcacgcggaggtt

SEQ ID NO: 2950 - DNA, 21 bp, Artificial Sequence
  Description of Artificial Sequence: Target Sequence/siNA antisense region (stab10)
  misc_feature (20)..(20): Phosphorothioate or Phosphorodithioate 3'-Internucleotide Linkage (optionally present)
  misc_feature (1). .(19): ribonucleotide unmodified or modified as described for this sequence
ccuccgcgugcucccgccgtt

SEQ ID NO: 2951 - DNA, 21 bp, Artificial Sequence
  Description of Artificial Sequence: Target Sequence/siNA antisense region (stab19)
  misc_feature (21)..(21): 3'-3 attached terminal deoxyabasic moiety, inverted abasic, inverted nucleotide or other terminal cap that is optionally present
  misc_feature (1)..(5): 2'-deoxy-2'Fluoro
  misc_feature (6)..(6): 2'-O-methyl
  misc_feature (7)..(7): 2'-deoxy-2'Fluoro
  misc_feature (8)..(8): 2'-O-methyl
  misc_feature (9)..(9): 2'-deoxy-2'Fluoro
  misc_feature (10)..(10): 2'-O-methyl
  misc_feature (11)..(15): 2'-deoxy-2'Fluoro
  misc_feature (16)..(16): 2'-O-methyl
  misc_feature (17)..(18): 2'-deoxy-2'Fluoro
  misc_feature (19)..(19): 2'-O-methyl
  misc_feature (1). .(19): ribonucleotide unmodified or modified as described for this sequence
ccuccgcgugcucccgccgtt

SEQ ID NO: 2952 - DNA, 21 bp, Artificial Sequence
  Description of Artificial Sequence: Target Sequence/siNA antisense region (stab22)
  misc_feature (21)..(21): 3'-3 attached terminal deoxyabasic moiety, inverted abasic, inverted nucleotide or other terminal cap that is optionally present
  misc_feature (20)..(20): Phosphorothioate or Phosphorodithioate 3'-Internucleotide Linkage (optionally present)
  misc_feature (1). .(19): ribonucleotide unmodified or modified as described for this sequence
ccuccgcgugcucccgccgtt

SEQ ID NO: 2953 - DNA, 21 bp, Artificial Sequence
  Description of Artificial Sequence: Target Sequence/siNA antisense region (stab25)
  misc_feature (4)..(5): 2'-deoxy-2'Fluoro
  misc_feature (6)..(6): 2'-O-methyl
  misc_feature (7)..(7): 2'-deoxy-2'Fluoro
  misc_feature (8)..(8): 2'-O-methyl
  misc_feature (9)..(9): 2'-deoxy-2'Fluoro
  misc_feature (10)..(10): 2'-O-methyl
  misc_feature (11)..(15): 2'-deoxy-2'Fluoro
  misc_feature (16)..(16): 2'-O-methyl
  misc_feature (17)..(18): 2'-deoxy-2'Fluoro
  misc_feature (19)..(19): 2'-O-methyl
  misc_feature (20)..(20): Phosphorothioate or Phosphorodithioate 3'-Internucleotide Linkage (optionally present)
  misc_feature (1)..(19): ribonucleotide unmodified or modified as described for this sequence
ccuccgcgugcucccgccgtt

SEQ ID NO: 2954 - RNA, 21 nt, Artificial Sequence
  Description of Artificial Sequence: Target Sequence/siNA antisense region (stab35)
  misc_feature (4)..(5): 2'-deoxy-2'Fluoro
  misc_feature (6)..(6): 2'-O-methyl
  misc_feature (7)..(7): 2'-deoxy-2'Fluoro
  misc_feature (8)..(8): 2'-O-methyl
  misc_feature (9)..(9): 2'-deoxy-2'Fluoro
  misc_feature (10)..(10): 2'-O-methyl
  misc_feature (11)..(15): 2'-deoxy-2'Fluoro
  misc_feature (16)..(16): 2'-O-methyl
  misc_feature (17)..(18): 2'-deoxy-2'Fluoro
  misc_feature (19)..(21): 2'-O-methyl
ccuccgcgugcucccgccguu

SEQ ID NO: 2955 - RNA, 21 nt, Artificial Sequence
  Description of Artificial Sequence: Target Sequence/siNA antisense region (stab36)
  misc_feature (4)..(5): 2'-deoxy-2'Fluoro
  misc_feature (6)..(6): 2'-O-methyl
  misc_feature (7)..(7): 2'-deoxy-2'Fluoro
  misc_feature (8)..(8): 2'-O-methyl
  misc_feature (9)..(9): 2'-deoxy-2'Fluoro
  misc_feature (10)..(10): 2'-O-methyl
  misc_feature (11)..(15): 2'-deoxy-2'Fluoro
  misc_feature (16)..(16): 2'-O-methyl
  misc_feature (17)..(18): 2'-deoxy-2'Fluoro
  misc_feature (19)..(21): 2'-O-methyl
ccuccgcgugcucccgccgcg

SEQ ID NO: 2956 - RNA, 19 nt, Artificial Sequence
  Description of Artificial Sequence: Target Sequence/siNA sense region
gccuugcugcuggccuccu

SEQ ID NO: 2957 - RNA, 19 nt, Artificial Sequence
  Description of Artificial Sequence: Target Sequence/siNA antisense region
aggaggccagcagcaaggc

SEQ ID NO: 2958 - DNA, 21 bp, Artificial Sequence
  Description of Artificial Sequence: Target Sequence/siNA sense region (stab00)
  misc_feature (1). .(19): ribonucleotide unmodified or modified as described for this sequence
gccuugcugcuggccuccutt

SEQ ID NO: 2959 - DNA, 21 bp, Artificial Sequence
  Description of Artificial Sequence: Target Sequence/siNA antisense region (stab00as)
  misc_feature (1). .(19): ribonucleotide unmodified or modified as described for this sequence
aggaggccagcagcaaggctt

SEQ ID NO: 2960 - DNA, 21 bp, Artificial Sequence
  Description of Artificial Sequence: Target Sequence/siNA sense region (stab04)
  misc_feature (1)..(1): 5'-3 attached terminal deoxyabasic moiety, inverted abasic, inverted nucleotide or other terminal cap that is optionally present
  misc_feature (21)..(21): 3'-3 attached terminal deoxyabasic moiety, inverted abasic, inverted nucleotide or other terminal cap that is optionally present
  misc_feature (2)..(5): 2'-deoxy-2'Fluoro
  misc_feature (7)..(8): 2'-deoxy-2'Fluoro
  misc_feature (10)..(11): 2'-deoxy-2'Fluoro
  misc_feature (14)..(19): 2'-deoxy-2'Fluoro
  misc_feature (1)..(19): ribonucleotide unmodified or modified as described for this sequence
gccuugcugcuggccuccutt

SEQ ID NO: 2961 - DNA, 21 bp, Artificial Sequence
  Description of Artificial Sequence: Target Sequence/siNA antisense region (stab05)
  misc_feature (7)..(8): 2'-deoxy-2'Fluoro
  misc_feature (11)..(11): 2'-deoxy-2'Fluoro
  misc_feature (14)..(14): 2'-deoxy-2'Fluoro
  misc_feature (19)..(19): 2'-deoxy-2'Fluoro
  misc_feature (20)..(20): Phosphorothioate or Phosphorodithioate 3'-Internucleotide Linkage (optionally present)
  misc_feature (1)..(19): ribonucleotide unmodified or modified as described for this sequence
aggaggccagcagcaaggctt

SEQ ID NO: 2962 - DNA, 21 bp, Artificial Sequence
  Description of Artificial Sequence: Target Sequence/siNA sense region (stab07)
  misc_feature (1)..(1): 5'-3 attached terminal deoxyabasic moiety, inverted abasic, inverted nucleotide or other terminal cap that is optionally present
  misc_feature (21)..(21): 3'-3 attached terminal deoxyabasic moiety, inverted abasic, inverted nucleotide or other terminal cap that is optionally present
  misc_feature (2)..(5): 2'-deoxy-2'Fluoro
  misc_feature (7)..(8): 2'-deoxy-2'Fluoro
  misc_feature (10)..(11): 2'-deoxy-2'Fluoro
  misc_feature (14)..(19): 2'-deoxy-2'Fluoro
  misc_feature (1). .(19): ribonucleotide unmodified or modified as described for this sequence
gccuugcugcuggccuccutt

SEQ ID NO: 2963 - DNA, 21 bp, Artificial Sequence
  Description of Artificial Sequence: Target Sequence/siNA antisense region (stab08)
  misc_feature (1)..(6): 2'-O-methyl
  misc_feature (7)..(8): 2'-deoxy-2'Fluoro
  misc_feature (9)..(10): 2'-O-methyl
  misc_feature (11)..(11): 2'-deoxy-2'Fluoro
  misc_feature (12)..(13): 2'-O-methyl
  misc_feature (14)..(14): 2'-deoxy-2'Fluoro
  misc_feature (15)..(18): 2'-O-methyl
  misc_feature (19)..(19): 2'-deoxy-2'Fluoro
  misc_feature (20)..(20): Phosphorothioate or Phosphorodithioate 3'-Internucleotide Linkage (optionally present)
  misc_feature (1). .(19): ribonucleotide unmodified or modified as described for this sequence
aggaggccagcagcaaggctt

SEQ ID NO: 2964 - DNA, 21 bp, Artificial Sequence
  Description of Artificial Sequence: Target Sequence/siNA sense region (stab09)
  misc_feature (1)..(1): 5'-3 attached terminal deoxyabasic moiety, inverted abasic, inverted nucleotide or other terminal cap that is optionally present
  misc_feature (21)..(21): 3'-3 attached terminal deoxyabasic moiety, inverted abasic, inverted nucleotide or other terminal cap that is optionally present
  misc_feature (1). .(19): ribonucleotide unmodified or modified as described for this sequence
gccuugcugcuggccuccutt

SEQ ID NO: 2965 - DNA, 21 bp, Artificial Sequence
  Description of Artificial Sequence: Target Sequence/siNA antisense region (stab10)
  misc_feature (20)..(20): Phosphorothioate or Phosphorodithioate 3'-Internucleotide Linkage (optionally present)
  misc_feature (1). .(19): ribonucleotide unmodified or modified as described for this sequence
aggaggccagcagcaaggctt

SEQ ID NO: 2966 - DNA, 21 bp, Artificial Sequence
  Description of Artificial Sequence: Target Sequence/siNA antisense region (stab19)
  misc_feature (21)..(21): 3'-3 attached terminal deoxyabasic moiety, inverted abasic, inverted nucleotide or other terminal cap that is optionally present
  misc_feature (1)..(6): 2'-O-methyl
  misc_feature (7)..(8): 2'-deoxy-2'Fluoro
  misc_feature (9)..(10): 2'-O-methyl
  misc_feature (11)..(11): 2'-deoxy-2'Fluoro
  misc_feature (12)..(13): 2'-O-methyl
  misc_feature (14)..(14): 2'-deoxy-2'Fluoro
  misc_feature (15)..(18): 2'-O-methyl
  misc_feature (19)..(19): 2'-deoxy-2'Fluoro
  misc_feature (1). .(19): ribonucleotide unmodified or modified as described for this sequence
aggaggccagcagcaaggctt

SEQ ID NO: 2967 - DNA, 21 bp, Artificial Sequence
  Description of Artificial Sequence: Target Sequence/siNA antisense region (stab22)
  misc_feature (21)..(21): 3'-3 attached terminal deoxyabasic moiety, inverted abasic, inverted nucleotide or other terminal cap that is optionally present
  misc_feature (20)..(20): Phosphorothioate or Phosphorodithioate 3'-Internucleotide Linkage (optionally present)
  misc_feature (1). .(19): ribonucleotide unmodified or modified as described for this sequence
aggaggccagcagcaaggctt

SEQ ID NO: 2968 - DNA, 21 bp, Artificial Sequence
  Description of Artificial Sequence: Target Sequence/siNA antisense region (stab25)
  misc_feature (4)..(6): 2'-O-methyl
  misc_feature (7)..(8): 2'-deoxy-2'Fluoro
  misc_feature (9)..(10): 2'-O-methyl
  misc_feature (11)..(11): 2'-deoxy-2'Fluoro
  misc_feature (12)..(13): 2'-O-methyl
  misc_feature (14)..(14): 2'-deoxy-2'Fluoro
  misc_feature (15)..(18): 2'-O-methyl
  misc_feature (19)..(19): 2'-deoxy-2'Fluoro
  misc_feature (20)..(20): Phosphorothioate or Phosphorodithioate 3'-Internucleotide Linkage (optionally present)
  misc_feature (1)..(19): ribonucleotide unmodified or modified as described for this sequence
aggaggccagcagcaaggctt

SEQ ID NO: 2969 - RNA, 21 nt, Artificial Sequence
  Description of Artificial Sequence: Target Sequence/siNA antisense region (stab35)
  misc_feature (4)..(6): 2'-O-methyl
  misc_feature (7)..(8): 2'-deoxy-2'Fluoro
  misc_feature (9)..(10): 2'-O-methyl
  misc_feature (11)..(11): 2'-deoxy-2'Fluoro
  misc_feature (12)..(13): 2'-O-methyl
  misc_feature (14)..(14): 2'-deoxy-2'Fluoro
  misc_feature (15)..(18): 2'-O-methyl
  misc_feature (19)..(19): 2'-deoxy-2'Fluoro
  misc_feature (20)..(21): 2'-O-methyl
aggaggccagcagcaaggcuu

SEQ ID NO: 2970 - RNA, 21 nt, Artificial Sequence
  Description of Artificial Sequence: Target Sequence/siNA antisense region (stab36)
  misc_feature (4)..(6): 2'-O-methyl
  misc_feature (7)..(8): 2'-deoxy-2'Fluoro
  misc_feature (9)..(10): 2'-O-methyl
  misc_feature (11)..(11): 2'-deoxy-2'Fluoro
  misc_feature (12)..(13): 2'-O-methyl
  misc_feature (14)..(14): 2'-deoxy-2'Fluoro
  misc_feature (15)..(18): 2'-O-methyl
  misc_feature (19)..(19): 2'-deoxy-2'Fluoro
  misc_feature (20)..(21): 2'-O-methyl
aggaggccagcagcaaggccu

SEQ ID NO: 2971 - RNA, 19 nt, Artificial Sequence
  Description of Artificial Sequence: Target Sequence/siNA sense region
ugcuaccugccccccggcu

SEQ ID NO: 2972 - RNA, 19 nt, Artificial Sequence
  Description of Artificial Sequence: Target Sequence/siNA antisense region
agccggggggcagguagca

SEQ ID NO: 2973 - DNA, 21 bp, Artificial Sequence
  Description of Artificial Sequence: Target Sequence/siNA sense region (stab00)
  misc_feature (1). .(19): ribonucleotide unmodified or modified as described for this sequence
ugcuaccugccccccggcutt

SEQ ID NO: 2974 - DNA, 21 bp, Artificial Sequence
  Description of Artificial Sequence: Target Sequence/siNA antisense region (stab00as)
  misc_feature (1). .(19): ribonucleotide unmodified or modified as described for this sequence
agccggggggcagguagcatt

SEQ ID NO: 2975 - DNA, 21 bp, Artificial Sequence
  Description of Artificial Sequence: Target Sequence/siNA sense region (stab04)
  misc_feature (1)..(1): 5'-3 attached terminal deoxyabasic moiety, inverted abasic, inverted nucleotide or other terminal cap that is optionally present
  misc_feature (21)..(21): 3'-3 attached terminal deoxyabasic moiety, inverted abasic, inverted nucleotide or other terminal cap that is optionally present
  misc_feature (1)..(1): 2'-deoxy-2'Fluoro
  misc_feature (3)..(4): 2'-deoxy-2'Fluoro
  misc_feature (6)..(8): 2'-deoxy-2'Fluoro
  misc_feature (10)..(15): 2'-deoxy-2'Fluoro
  misc_feature (18)..(19): 2'-deoxy-2'Fluoro
  misc_feature (1)..(19): ribonucleotide unmodified or modified as described for this sequence
ugcuaccugccccccggcutt

SEQ ID NO: 2976 - DNA, 21 bp, Artificial Sequence
  Description of Artificial Sequence: Target Sequence/siNA antisense region (stab05)
  misc_feature (3)..(4): 2'-deoxy-2'Fluoro
  misc_feature (11)..(11): 2'-deoxy-2'Fluoro
  misc_feature (15)..(15): 2'-deoxy-2'Fluoro
  misc_feature (18)..(18): 2'-deoxy-2'Fluoro
  misc_feature (20)..(20): Phosphorothioate or Phosphorodithioate 3'-Internucleotide Linkage (optionally present)
  misc_feature (1)..(19): ribonucleotide unmodified or modified as described for this sequence
agccggggggcagguagcatt

SEQ ID NO: 2977 - DNA, 21 bp, Artificial Sequence
  Description of Artificial Sequence: Target Sequence/siNA sense region (stab07)
  misc_feature (1)..(1): 5'-3 attached terminal deoxyabasic moiety, inverted abasic, inverted nucleotide or other terminal cap that is optionally present
  misc_feature (21)..(21): 3'-3 attached terminal deoxyabasic moiety, inverted abasic, inverted nucleotide or other terminal cap that is optionally present
  misc_feature (1)..(1): 2'-deoxy-2'Fluoro
  misc_feature (3)..(4): 2'-deoxy-2'Fluoro
  misc_feature (6)..(8): 2'-deoxy-2'Fluoro
  misc_feature (10)..(15): 2'-deoxy-2'Fluoro
  misc_feature (18)..(19): 2'-deoxy-2'Fluoro
  misc_feature (1). .(19): ribonucleotide unmodified or modified as described for this sequence
ugcuaccugccccccggcutt

SEQ ID NO: 2978 - DNA, 21 bp, Artificial Sequence
  Description of Artificial Sequence: Target Sequence/siNA antisense region (stab08)
  misc_feature (1)..(2): 2'-O-methyl
  misc_feature (3)..(4): 2'-deoxy-2'Fluoro
  misc_feature (5)..(10): 2'-O-methyl
  misc_feature (11)..(11): 2'-deoxy-2'Fluoro
  misc_feature (12)..(14): 2'-O-methyl
  misc_feature (15)..(15): 2'-deoxy-2'Fluoro
  misc_feature (16)..(17): 2'-O-methyl
  misc_feature (18)..(18): 2'-deoxy-2'Fluoro
  misc_feature (19)..(19): 2'-O-methyl
  misc_feature (20)..(20): Phosphorothioate or Phosphorodithioate 3'-Internucleotide Linkage (optionally present)
  misc_feature (1). .(19): ribonucleotide unmodified or modified as described for this sequence
agccggggggcagguagcatt

SEQ ID NO: 2979 - DNA, 21 bp, Artificial Sequence
  Description of Artificial Sequence: Target Sequence/siNA sense region (stab09)
  misc_feature (1)..(1): 5'-3 attached terminal deoxyabasic moiety, inverted abasic, inverted nucleotide or other terminal cap that is optionally present
  misc_feature (21)..(21): 3'-3 attached terminal deoxyabasic moiety, inverted abasic, inverted nucleotide or other terminal cap that is optionally present
  misc_feature (1). .(19): ribonucleotide unmodified or modified as described for this sequence
ugcuaccugccccccggcutt

SEQ ID NO: 2980 - DNA, 21 bp, Artificial Sequence
  Description of Artificial Sequence: Target Sequence/siNA antisense region (stab10)
  misc_feature (20)..(20): Phosphorothioate or Phosphorodithioate 3'-Internucleotide Linkage (optionally present)
  misc_feature (1). .(19): ribonucleotide unmodified or modified as described for this sequence
agccggggggcagguagcatt

SEQ ID NO: 2981 - DNA, 21 bp, Artificial Sequence
  Description of Artificial Sequence: Target Sequence/siNA antisense region (stab19)
  misc_feature (21)..(21): 3'-3 attached terminal deoxyabasic moiety, inverted abasic, inverted nucleotide or other terminal cap that is optionally present
  misc_feature (1)..(2): 2'-O-methyl
  misc_feature (3)..(4): 2'-deoxy-2'Fluoro
  misc_feature (5)..(10): 2'-O-methyl
  misc_feature (11)..(11): 2'-deoxy-2'Fluoro
  misc_feature (12)..(14): 2'-O-methyl
  misc_feature (15)..(15): 2'-deoxy-2'Fluoro
  misc_feature (16)..(17): 2'-O-methyl
  misc_feature (18)..(18): 2'-deoxy-2'Fluoro
  misc_feature (19)..(19): 2'-O-methyl
  misc_feature (1). .(19): ribonucleotide unmodified or modified as described for this sequence
agccggggggcagguagcatt

SEQ ID NO: 2982 - DNA, 21 bp, Artificial Sequence
  Description of Artificial Sequence: Target Sequence/siNA antisense region (stab22)
  misc_feature (21)..(21): 3'-3 attached terminal deoxyabasic moiety, inverted abasic, inverted nucleotide or other terminal cap that is optionally present
  misc_feature (20)..(20): Phosphorothioate or Phosphorodithioate 3'-Internucleotide Linkage (optionally present)
  misc_feature (1). .(19): ribonucleotide unmodified or modified as described for this sequence
agccggggggcagguagcatt

SEQ ID NO: 2983 - DNA, 21 bp, Artificial Sequence
  Description of Artificial Sequence: Target Sequence/siNA antisense region (stab25)
  misc_feature (4)..(4): 2'-deoxy-2'Fluoro
  misc_feature (5)..(10): 2'-O-methyl
  misc_feature (11)..(11): 2'-deoxy-2'Fluoro
  misc_feature (12)..(14): 2'-O-methyl
  misc_feature (15)..(15): 2'-deoxy-2'Fluoro
  misc_feature (16)..(17): 2'-O-methyl
  misc_feature (18)..(18): 2'-deoxy-2'Fluoro
  misc_feature (19)..(19): 2'-O-methyl
  misc_feature (20)..(20): Phosphorothioate or Phosphorodithioate 3'-Internucleotide Linkage (optionally present)
  misc_feature (1)..(19): ribonucleotide unmodified or modified as described for this sequence
agccggggggcagguagcatt

SEQ ID NO: 2984 - RNA, 21 nt, Artificial Sequence
  Description of Artificial Sequence: Target Sequence/siNA antisense region (stab35)
  misc_feature (4)..(4): 2'-deoxy-2'Fluoro
  misc_feature (5)..(10): 2'-O-methyl
  misc_feature (11)..(11): 2'-deoxy-2'Fluoro
  misc_feature (12)..(14): 2'-O-methyl
  misc_feature (15)..(15): 2'-deoxy-2'Fluoro
  misc_feature (16)..(17): 2'-O-methyl
  misc_feature (18)..(18): 2'-deoxy-2'Fluoro
  misc_feature (19)..(21): 2'-O-methyl
agccggggggcagguagcauu

SEQ ID NO: 2985 - RNA, 21 nt, Artificial Sequence
  Description of Artificial Sequence: Target Sequence/siNA antisense region (stab36)
  misc_feature (4)..(4): 2'-deoxy-2'Fluoro
  misc_feature (5)..(10): 2'-O-methyl
  misc_feature (11)..(11): 2'-deoxy-2'Fluoro
  misc_feature (12)..(14): 2'-O-methyl
  misc_feature (15)..(15): 2'-deoxy-2'Fluoro
  misc_feature (16)..(17): 2'-O-methyl
  misc_feature (18)..(18): 2'-deoxy-2'Fluoro
  misc_feature (19)..(21): 2'-O-methyl
agccggggggcagguagcagg

SEQ ID NO: 2986 - RNA, 19 nt, Artificial Sequence
  Description of Artificial Sequence: Target Sequence/siNA sense region
uuccugucggcgcccgggc

SEQ ID NO: 2987 - RNA, 19 nt, Artificial Sequence
  Description of Artificial Sequence: Target Sequence/siNA antisense region
gcccgggcgccgacaggaa

SEQ ID NO: 2988 - DNA, 21 bp, Artificial Sequence
  Description of Artificial Sequence: Target Sequence/siNA sense region (stab00)
  misc_feature (1). .(19): ribonucleotide unmodified or modified as described for this sequence
uuccugucggcgcccgggctt

SEQ ID NO: 2989 - DNA, 21 bp, Artificial Sequence
  Description of Artificial Sequence: Target Sequence/siNA antisense region (stab00as)
  misc_feature (1). .(19): ribonucleotide unmodified or modified as described for this sequence
gcccgggcgccgacaggaatt

SEQ ID NO: 2990 - DNA, 21 bp, Artificial Sequence
  Description of Artificial Sequence: Target Sequence/siNA sense region (stab04)
  misc_feature (1)..(1): 5'-3 attached terminal deoxyabasic moiety, inverted abasic, inverted nucleotide or other terminal cap that is optionally present
  misc_feature (21)..(21): 3'-3 attached terminal deoxyabasic moiety, inverted abasic, inverted nucleotide or other terminal cap that is optionally present
  misc_feature (1)..(5): 2'-deoxy-2'Fluoro
  misc_feature (7)..(8): 2'-deoxy-2'Fluoro
  misc_feature (11)..(11): 2'-deoxy-2'Fluoro
  misc_feature (13)..(15): 2'-deoxy-2'Fluoro
  misc_feature (19)..(19): 2'-deoxy-2'Fluoro
  misc_feature (1)..(19): ribonucleotide unmodified or modified as described for this sequence
uuccugucggcgcccgggctt

SEQ ID NO: 2991 - DNA, 21 bp, Artificial Sequence
  Description of Artificial Sequence: Target Sequence/siNA antisense region (stab05)
  misc_feature (2)..(4): 2'-deoxy-2'Fluoro
  misc_feature (8)..(8): 2'-deoxy-2'Fluoro
  misc_feature (10)..(11): 2'-deoxy-2'Fluoro
  misc_feature (14)..(14): 2'-deoxy-2'Fluoro
  misc_feature (20)..(20): Phosphorothioate or Phosphorodithioate 3'-Internucleotide Linkage (optionally present)
  misc_feature (1)..(19): ribonucleotide unmodified or modified as described for this sequence
gcccgggcgccgacaggaatt

SEQ ID NO: 2992 - DNA, 21 bp, Artificial Sequence
  Description of Artificial Sequence: Target Sequence/siNA sense region (stab07)
  misc_feature (1)..(1): 5'-3 attached terminal deoxyabasic moiety, inverted abasic, inverted nucleotide or other terminal cap that is optionally present
  misc_feature (21)..(21): 3'-3 attached terminal deoxyabasic moiety, inverted abasic, inverted nucleotide or other terminal cap that is optionally present
  misc_feature (1)..(5): 2'-deoxy-2'Fluoro
  misc_feature (7)..(8): 2'-deoxy-2'Fluoro
  misc_feature (11)..(11): 2'-deoxy-2'Fluoro
  misc_feature (13)..(15): 2'-deoxy-2'Fluoro
  misc_feature (19)..(19): 2'-deoxy-2'Fluoro
  misc_feature (1). .(19): ribonucleotide unmodified or modified as described for this sequence
uuccugucggcgcccgggctt

SEQ ID NO: 2993 - DNA, 21 bp, Artificial Sequence
  Description of Artificial Sequence: Target Sequence/siNA antisense region (stab08)
  misc_feature (1)..(1): 2'-O-methyl
  misc_feature (2)..(4): 2'-deoxy-2'Fluoro
  misc_feature (5)..(7): 2'-O-methyl
  misc_feature (8)..(8): 2'-deoxy-2'Fluoro
  misc_feature (9)..(9): 2'-O-methyl
  misc_feature (10)..(11): 2'-deoxy-2'Fluoro
  misc_feature (12)..(13): 2'-O-methyl
  misc_feature (14)..(14): 2'-deoxy-2'Fluoro
  misc_feature (15)..(19): 2'-O-methyl
  misc_feature (20)..(20): Phosphorothioate or Phosphorodithioate 3'-Internucleotide Linkage (optionally present)
  misc_feature (1). .(19): ribonucleotide unmodified or modified as described for this sequence
gcccgggcgccgacaggaatt

SEQ ID NO: 2994 - DNA, 21 bp, Artificial Sequence
  Description of Artificial Sequence: Target Sequence/siNA sense region (stab09)
  misc_feature (1)..(1): 5'-3 attached terminal deoxyabasic moiety, inverted abasic, inverted nucleotide or other terminal cap that is optionally present
  misc_feature (21)..(21): 3'-3 attached terminal deoxyabasic moiety, inverted abasic, inverted nucleotide or other terminal cap that is optionally present
  misc_feature (1). .(19): ribonucleotide unmodified or modified as described for this sequence
uuccugucggcgcccgggctt

SEQ ID NO: 2995 - DNA, 21 bp, Artificial Sequence
  Description of Artificial Sequence: Target Sequence/siNA antisense region (stab10)
  misc_feature (20)..(20): Phosphorothioate or Phosphorodithioate 3'-Internucleotide Linkage (optionally present)
  misc_feature (1). .(19): ribonucleotide unmodified or modified as described for this sequence
gcccgggcgccgacaggaatt

SEQ ID NO: 2996 - DNA, 21 bp, Artificial Sequence
  Description of Artificial Sequence: Target Sequence/siNA antisense region (stab19)
  misc_feature (21)..(21): 3'-3 attached terminal deoxyabasic moiety, inverted abasic, inverted nucleotide or other terminal cap that is optionally present
  misc_feature (1)..(1): 2'-O-methyl
  misc_feature (2)..(4): 2'-deoxy-2'Fluoro
  misc_feature (5)..(7): 2'-O-methyl
  misc_feature (8)..(8): 2'-deoxy-2'Fluoro
  misc_feature (9)..(9): 2'-O-methyl
  misc_feature (10)..(11): 2'-deoxy-2'Fluoro
  misc_feature (12)..(13): 2'-O-methyl
  misc_feature (14)..(14): 2'-deoxy-2'Fluoro
  misc_feature (15)..(19): 2'-O-methyl
  misc_feature (1). .(19): ribonucleotide unmodified or modified as described for this sequence
gcccgggcgccgacaggaatt

SEQ ID NO: 2997 - DNA, 21 bp, Artificial Sequence
  Description of Artificial Sequence: Target Sequence/siNA antisense region (stab22)
  misc_feature (21)..(21): 3'-3 attached terminal deoxyabasic moiety, inverted abasic, inverted nucleotide or other terminal cap that is optionally present
  misc_feature (20)..(20): Phosphorothioate or Phosphorodithioate 3'-Internucleotide Linkage (optionally present)
  misc_feature (1). .(19): ribonucleotide unmodified or modified as described for this sequence
gcccgggcgccgacaggaatt

SEQ ID NO: 2998 - DNA, 21 bp, Artificial Sequence
  Description of Artificial Sequence: Target Sequence/siNA antisense region (stab25)
  misc_feature (4)..(4): 2'-deoxy-2'Fluoro
  misc_feature (5)..(7): 2'-O-methyl
  misc_feature (8)..(8): 2'-deoxy-2'Fluoro
  misc_feature (9)..(9): 2'-O-methyl
  misc_feature (10)..(11): 2'-deoxy-2'Fluoro
  misc_feature (12)..(13): 2'-O-methyl
  misc_feature (14)..(14): 2'-deoxy-2'Fluoro
  misc_feature (15)..(19): 2'-O-methyl
  misc_feature (20)..(20): Phosphorothioate or Phosphorodithioate 3'-Internucleotide Linkage (optionally present)
  misc_feature (1)..(19): ribonucleotide unmodified or modified as described for this sequence
gcccgggcgccgacaggaatt

SEQ ID NO: 2999 - RNA, 21 nt, Artificial Sequence
  Description of Artificial Sequence: Target Sequence/siNA antisense region (stab35)
  misc_feature (4)..(4): 2'-deoxy-2'Fluoro
  misc_feature (5)..(7): 2'-O-methyl
  misc_feature (8)..(8): 2'-deoxy-2'Fluoro
  misc_feature (9)..(9): 2'-O-methyl
  misc_feature (10)..(11): 2'-deoxy-2'Fluoro
  misc_feature (12)..(13): 2'-O-methyl
  misc_feature (14)..(14): 2'-deoxy-2'Fluoro
  misc_feature (15)..(21): 2'-O-methyl
gcccgggcgccgacaggaauu

SEQ ID NO: 3000 - RNA, 21 nt, Artificial Sequence
  Description of Artificial Sequence: Target Sequence/siNA antisense region (stab36)
  misc_feature (4)..(4): 2'-deoxy-2'Fluoro
  misc_feature (5)..(7): 2'-O-methyl
  misc_feature (8)..(8): 2'-deoxy-2'Fluoro
  misc_feature (9)..(9): 2'-O-methyl
  misc_feature (10)..(11): 2'-deoxy-2'Fluoro
  misc_feature (12)..(13): 2'-O-methyl
  misc_feature (14)..(14): 2'-deoxy-2'Fluoro
  misc_feature (15)..(21): 2'-O-methyl
gcccgggcgccgacaggaagc

SEQ ID NO: 3001 - RNA, 19 nt, Artificial Sequence
  Description of Artificial Sequence: Target Sequence/siNA sense region
cagcgcgugggcaugcugg

SEQ ID NO: 3002 - RNA, 19 nt, Artificial Sequence
  Description of Artificial Sequence: Target Sequence/siNA antisense region
ccagcaugcccacgcgcug

SEQ ID NO: 3003 - DNA, 21 bp, Artificial Sequence
  Description of Artificial Sequence: Target Sequence/siNA sense region (stab00)
  misc_feature (1). .(19): ribonucleotide unmodified or modified as described for this sequence
cagcgcgugggcaugcuggtt

SEQ ID NO: 3004 - DNA, 21 bp, Artificial Sequence
  Description of Artificial Sequence: Target Sequence/siNA antisense region (stab00as)
  misc_feature (1). .(19): ribonucleotide unmodified or modified as described for this sequence
ccagcaugcccacgcgcugtt

SEQ ID NO: 3005 - DNA, 21 bp, Artificial Sequence
  Description of Artificial Sequence: Target Sequence/siNA sense region (stab04)
  misc_feature (1)..(1): 5'-3 attached terminal deoxyabasic moiety, inverted abasic, inverted nucleotide or other terminal cap that is optionally present
  misc_feature (21)..(21): 3'-3 attached terminal deoxyabasic moiety, inverted abasic, inverted nucleotide or other terminal cap that is optionally present
  misc_feature (1)..(1): 2'-deoxy-2'Fluoro
  misc_feature (4)..(4): 2'-deoxy-2'Fluoro
  misc_feature (6)..(6): 2'-deoxy-2'Fluoro
  misc_feature (8)..(8): 2'-deoxy-2'Fluoro
  misc_feature (12)..(12): 2'-deoxy-2'Fluoro
  misc_feature (14)..(14): 2'-deoxy-2'Fluoro
  misc_feature (16)..(17): 2'-deoxy-2'Fluoro
  misc_feature (1)..(19): ribonucleotide unmodified or modified as described for this sequence
cagcgcgugggcaugcuggtt

SEQ ID NO: 3006 - DNA, 21 bp, Artificial Sequence
  Description of Artificial Sequence: Target Sequence/siNA antisense region (stab05)
  misc_feature (1)..(2): 2'-deoxy-2'Fluoro
  misc_feature (5)..(5): 2'-deoxy-2'Fluoro
  misc_feature (7)..(7): 2'-deoxy-2'Fluoro
  misc_feature (9)..(11): 2'-deoxy-2'Fluoro
  misc_feature (13)..(13): 2'-deoxy-2'Fluoro
  misc_feature (15)..(15): 2'-deoxy-2'Fluoro
  misc_feature (17)..(18): 2'-deoxy-2'Fluoro
  misc_feature (20)..(20): Phosphorothioate or Phosphorodithioate 3'-Internucleotide Linkage (optionally present)
  misc_feature (1)..(19): ribonucleotide unmodified or modified as described for this sequence
ccagcaugcccacgcgcugtt

SEQ ID NO: 3007 - DNA, 21 bp, Artificial Sequence
  Description of Artificial Sequence: Target Sequence/siNA sense region (stab07)
  misc_feature (1)..(1): 5'-3 attached terminal deoxyabasic moiety, inverted abasic, inverted nucleotide or other terminal cap that is optionally present
  misc_feature (21)..(21): 3'-3 attached terminal deoxyabasic moiety, inverted abasic, inverted nucleotide or other terminal cap that is optionally present
  misc_feature (1)..(1): 2'-deoxy-2'Fluoro
  misc_feature (4)..(4): 2'-deoxy-2'Fluoro
  misc_feature (6)..(6): 2'-deoxy-2'Fluoro
  misc_feature (8)..(8): 2'-deoxy-2'Fluoro
  misc_feature (12)..(12): 2'-deoxy-2'Fluoro
  misc_feature (14)..(14): 2'-deoxy-2'Fluoro
  misc_feature (16)..(17): 2'-deoxy-2'Fluoro
  misc_feature (1). .(19): ribonucleotide unmodified or modified as described for this sequence
cagcgcgugggcaugcuggtt

SEQ ID NO: 3008 - DNA, 21 bp, Artificial Sequence
  Description of Artificial Sequence: Target Sequence/siNA antisense region (stab08)
  misc_feature (1)..(2): 2'-deoxy-2'Fluoro
  misc_feature (3)..(4): 2'-O-methyl
  misc_feature (5)..(5): 2'-deoxy-2'Fluoro
  misc_feature (6)..(6): 2'-O-methyl
  misc_feature (7)..(7): 2'-deoxy-2'Fluoro
  misc_feature (8)..(8): 2'-O-methyl
  misc_feature (9)..(11): 2'-deoxy-2'Fluoro
  misc_feature (12)..(12): 2'-O-methyl
  misc_feature (13)..(13): 2'-deoxy-2'Fluoro
  misc_feature (14)..(14): 2'-O-methyl
  misc_feature (15)..(15): 2'-deoxy-2'Fluoro
  misc_feature (16)..(16): 2'-O-methyl
  misc_feature (17)..(18): 2'-deoxy-2'Fluoro
  misc_feature (19)..(19): 2'-O-methyl
  misc_feature (20)..(20): Phosphorothioate or Phosphorodithioate 3'-Internucleotide Linkage (optionally present)
  misc_feature (1). .(19): ribonucleotide unmodified or modified as described for this sequence
ccagcaugcccacgcgcugtt

SEQ ID NO: 3009 - DNA, 21 bp, Artificial Sequence
  Description of Artificial Sequence: Target Sequence/siNA sense region (stab09)
  misc_feature (1)..(1): 5'-3 attached terminal deoxyabasic moiety, inverted abasic, inverted nucleotide or other terminal cap that is optionally present
  misc_feature (21)..(21): 3'-3 attached terminal deoxyabasic moiety, inverted abasic, inverted nucleotide or other terminal cap that is optionally present
  misc_feature (1). .(19): ribonucleotide unmodified or modified as described for this sequence
cagcgcgugggcaugcuggtt

SEQ ID NO: 3010 - DNA, 21 bp, Artificial Sequence
  Description of Artificial Sequence: Target Sequence/siNA antisense region (stab10)
  misc_feature (20)..(20): Phosphorothioate or Phosphorodithioate 3'-Internucleotide Linkage (optionally present)
  misc_feature (1). .(19): ribonucleotide unmodified or modified as described for this sequence
ccagcaugcccacgcgcugtt

SEQ ID NO: 3011 - DNA, 21 bp, Artificial Sequence
  Description of Artificial Sequence: Target Sequence/siNA antisense region (stab19)
  misc_feature (21)..(21): 3'-3 attached terminal deoxyabasic moiety, inverted abasic, inverted nucleotide or other terminal cap that is optionally present
  misc_feature (1)..(2): 2'-deoxy-2'Fluoro
  misc_feature (3)..(4): 2'-O-methyl
  misc_feature (5)..(5): 2'-deoxy-2'Fluoro
  misc_feature (6)..(6): 2'-O-methyl
  misc_feature (7)..(7): 2'-deoxy-2'Fluoro
  misc_feature (8)..(8): 2'-O-methyl
  misc_feature (9)..(11): 2'-deoxy-2'Fluoro
  misc_feature (12)..(12): 2'-O-methyl
  misc_feature (13)..(13): 2'-deoxy-2'Fluoro
  misc_feature (14)..(14): 2'-O-methyl
  misc_feature (15)..(15): 2'-deoxy-2'Fluoro
  misc_feature (16)..(16): 2'-O-methyl
  misc_feature (17)..(18): 2'-deoxy-2'Fluoro
  misc_feature (19)..(19): 2'-O-methyl
  misc_feature (1). .(19): ribonucleotide unmodified or modified as described for this sequence
ccagcaugcccacgcgcugtt

SEQ ID NO: 3012 - DNA, 21 bp, Artificial Sequence
  Description of Artificial Sequence: Target Sequence/siNA antisense region (stab22)
  misc_feature (21)..(21): 3'-3 attached terminal deoxyabasic moiety, inverted abasic, inverted nucleotide or other terminal cap that is optionally present
  misc_feature (20)..(20): Phosphorothioate or Phosphorodithioate 3'-Internucleotide Linkage (optionally present)
  misc_feature (1). .(19): ribonucleotide unmodified or modified as described for this sequence
ccagcaugcccacgcgcugtt

SEQ ID NO: 3013 - DNA, 21 bp, Artificial Sequence
  Description of Artificial Sequence: Target Sequence/siNA antisense region (stab25)
  misc_feature (4)..(4): 2'-O-methyl
  misc_feature (5)..(5): 2'-deoxy-2'Fluoro
  misc_feature (6)..(6): 2'-O-methyl
  misc_feature (7)..(7): 2'-deoxy-2'Fluoro
  misc_feature (8)..(8): 2'-O-methyl
  misc_feature (9)..(11): 2'-deoxy-2'Fluoro
  misc_feature (12)..(12): 2'-O-methyl
  misc_feature (13)..(13): 2'-deoxy-2'Fluoro
  misc_feature (14)..(14): 2'-O-methyl
  misc_feature (15)..(15): 2'-deoxy-2'Fluoro
  misc_feature (16)..(16): 2'-O-methyl
  misc_feature (17)..(18): 2'-deoxy-2'Fluoro
  misc_feature (19)..(19): 2'-O-methyl
  misc_feature (20)..(20): Phosphorothioate or Phosphorodithioate 3'-Internucleotide Linkage (optionally present)
  misc_feature (1)..(19): ribonucleotide unmodified or modified as described for this sequence
ccagcaugcccacgcgcugtt

SEQ ID NO: 3014 - RNA, 21 nt, Artificial Sequence
  Description of Artificial Sequence: Target Sequence/siNA antisense region (stab35)
  misc_feature (4)..(4): 2'-O-methyl
  misc_feature (5)..(5): 2'-deoxy-2'Fluoro
  misc_feature (6)..(6): 2'-O-methyl
  misc_feature (7)..(7): 2'-deoxy-2'Fluoro
  misc_feature (8)..(8): 2'-O-methyl
  misc_feature (9)..(11): 2'-deoxy-2'Fluoro
  misc_feature (12)..(12): 2'-O-methyl
  misc_feature (13)..(13): 2'-deoxy-2'Fluoro
  misc_feature (14)..(14): 2'-O-methyl
  misc_feature (15)..(15): 2'-deoxy-2'Fluoro
  misc_feature (16)..(16): 2'-O-methyl
  misc_feature (17)..(18): 2'-deoxy-2'Fluoro
  misc_feature (19)..(21): 2'-O-methyl
ccagcaugcccacgcgcuguu

SEQ ID NO: 3015 - RNA, 21 nt, Artificial Sequence
  Description of Artificial Sequence: Target Sequence/siNA antisense region (stab36)
  misc_feature (4)..(4): 2'-O-methyl
  misc_feature (5)..(5): 2'-deoxy-2'Fluoro
  misc_feature (6)..(6): 2'-O-methyl
  misc_feature (7)..(7): 2'-deoxy-2'Fluoro
  misc_feature (8)..(8): 2'-O-methyl
  misc_feature (9)..(11): 2'-deoxy-2'Fluoro
  misc_feature (12)..(12): 2'-O-methyl
  misc_feature (13)..(13): 2'-deoxy-2'Fluoro
  misc_feature (14)..(14): 2'-O-methyl
  misc_feature (15)..(15): 2'-deoxy-2'Fluoro
  misc_feature (16)..(16): 2'-O-methyl
  misc_feature (17)..(18): 2'-deoxy-2'Fluoro
  misc_feature (19)..(21): 2'-O-methyl
ccagcaugcccacgcgcugcc

SEQ ID NO: 3016 - RNA, 19 nt, Artificial Sequence
  Description of Artificial Sequence: Target Sequence/siNA sense region
gcugaggcggcgcgcacac

SEQ ID NO: 3017 - RNA, 19 nt, Artificial Sequence
  Description of Artificial Sequence: Target Sequence/siNA antisense region
gugugcgcgccgccucagc

SEQ ID NO: 3018 - DNA, 21 bp, Artificial Sequence
  Description of Artificial Sequence: Target Sequence/siNA sense region (stab00)
  misc_feature (1). .(19): ribonucleotide unmodified or modified as described for this sequence
gcugaggcggcgcgcacactt

SEQ ID NO: 3019 - DNA, 21 bp, Artificial Sequence
  Description of Artificial Sequence: Target Sequence/siNA antisense region (stab00as)
  misc_feature (1). .(19): ribonucleotide unmodified or modified as described for this sequence
gugugcgcgccgccucagctt

SEQ ID NO: 3020 - DNA, 21 bp, Artificial Sequence
  Description of Artificial Sequence: Target Sequence/siNA sense region (stab04)
  misc_feature (1)..(1): 5'-3 attached terminal deoxyabasic moiety, inverted abasic, inverted nucleotide or other terminal cap that is optionally present
  misc_feature (21)..(21): 3'-3 attached terminal deoxyabasic moiety, inverted abasic, inverted nucleotide or other terminal cap that is optionally present
  misc_feature (2)..(3): 2'-deoxy-2'Fluoro
  misc_feature (8)..(8): 2'-deoxy-2'Fluoro
  misc_feature (11)..(11): 2'-deoxy-2'Fluoro
  misc_feature (13)..(13): 2'-deoxy-2'Fluoro
  misc_feature (15)..(15): 2'-deoxy-2'Fluoro
  misc_feature (17)..(17): 2'-deoxy-2'Fluoro
  misc_feature (19)..(19): 2'-deoxy-2'Fluoro
  misc_feature (1)..(19): ribonucleotide unmodified or modified as described for this sequence
gcugaggcggcgcgcacactt

SEQ ID NO: 3021 - DNA, 21 bp, Artificial Sequence
  Description of Artificial Sequence: Target Sequence/siNA antisense region (stab05)
  misc_feature (2)..(2): 2'-deoxy-2'Fluoro
  misc_feature (4)..(4): 2'-deoxy-2'Fluoro
  misc_feature (6)..(6): 2'-deoxy-2'Fluoro
  misc_feature (8)..(8): 2'-deoxy-2'Fluoro
  misc_feature (10)..(11): 2'-deoxy-2'Fluoro
  misc_feature (13)..(16): 2'-deoxy-2'Fluoro
  misc_feature (19)..(19): 2'-deoxy-2'Fluoro
  misc_feature (20)..(20): Phosphorothioate or Phosphorodithioate 3'-Internucleotide Linkage (optionally present)
  misc_feature (1)..(19): ribonucleotide unmodified or modified as described for this sequence
gugugcgcgccgccucagctt

SEQ ID NO: 3022 - DNA, 21 bp, Artificial Sequence
  Description of Artificial Sequence: Target Sequence/siNA sense region (stab07)
  misc_feature (1)..(1): 5'-3 attached terminal deoxyabasic moiety, inverted abasic, inverted nucleotide or other terminal cap that is optionally present
  misc_feature (21)..(21): 3'-3 attached terminal deoxyabasic moiety, inverted abasic, inverted nucleotide or other terminal cap that is optionally present
  misc_feature (2)..(3): 2'-deoxy-2'Fluoro
  misc_feature (8)..(8): 2'-deoxy-2'Fluoro
  misc_feature (11)..(11): 2'-deoxy-2'Fluoro
  misc_feature (13)..(13): 2'-deoxy-2'Fluoro
  misc_feature (15)..(15): 2'-deoxy-2'Fluoro
  misc_feature (17)..(17): 2'-deoxy-2'Fluoro
  misc_feature (19)..(19): 2'-deoxy-2'Fluoro
  misc_feature (1). .(19): ribonucleotide unmodified or modified as described for this sequence
gcugaggcggcgcgcacactt

SEQ ID NO: 3023 - DNA, 21 bp, Artificial Sequence
  Description of Artificial Sequence: Target Sequence/siNA antisense region (stab08)
  misc_feature (1)..(1): 2'-O-methyl
  misc_feature (2)..(2): 2'-deoxy-2'Fluoro
  misc_feature (3)..(3): 2'-O-methyl
  misc_feature (4)..(4): 2'-deoxy-2'Fluoro
  misc_feature (5)..(5): 2'-O-methyl
  misc_feature (6)..(6): 2'-deoxy-2'Fluoro
  misc_feature (7)..(7): 2'-O-methyl
  misc_feature (8)..(8): 2'-deoxy-2'Fluoro
  misc_feature (9)..(9): 2'-O-methyl
  misc_feature (10)..(11): 2'-deoxy-2'Fluoro
  misc_feature (12)..(12): 2'-O-methyl
  misc_feature (13)..(16): 2'-deoxy-2'Fluoro
  misc_feature (17)..(18): 2'-O-methyl
  misc_feature (19)..(19): 2'-deoxy-2'Fluoro
  misc_feature (20)..(20): Phosphorothioate or Phosphorodithioate 3'-Internucleotide Linkage (optionally present)
  misc_feature (1). .(19): ribonucleotide unmodified or modified as described for this sequence
gugugcgcgccgccucagctt

SEQ ID NO: 3024 - DNA, 21 bp, Artificial Sequence
  Description of Artificial Sequence: Target Sequence/siNA sense region (stab09)
  misc_feature (1)..(1): 5'-3 attached terminal deoxyabasic moiety, inverted abasic, inverted nucleotide or other terminal cap that is optionally present
  misc_feature (21)..(21): 3'-3 attached terminal deoxyabasic moiety, inverted abasic, inverted nucleotide or other terminal cap that is optionally present
  misc_feature (1). .(19): ribonucleotide unmodified or modified as described for this sequence
gcugaggcggcgcgcacactt

SEQ ID NO: 3025 - DNA, 21 bp, Artificial Sequence
  Description of Artificial Sequence: Target Sequence/siNA antisense region (stab10)
  misc_feature (20)..(20): Phosphorothioate or Phosphorodithioate 3'-Internucleotide Linkage (optionally present)
  misc_feature (1). .(19): ribonucleotide unmodified or modified as described for this sequence
gugugcgcgccgccucagctt

SEQ ID NO: 3026 - DNA, 21 bp, Artificial Sequence
  Description of Artificial Sequence: Target Sequence/siNA antisense region (stab19)
  misc_feature (21)..(21): 3'-3 attached terminal deoxyabasic moiety, inverted abasic, inverted nucleotide or other terminal cap that is optionally present
  misc_feature (1)..(1): 2'-O-methyl
  misc_feature (2)..(2): 2'-deoxy-2'Fluoro
  misc_feature (3)..(3): 2'-O-methyl
  misc_feature (4)..(4): 2'-deoxy-2'Fluoro
  misc_feature (5)..(5): 2'-O-methyl
  misc_feature (6)..(6): 2'-deoxy-2'Fluoro
  misc_feature (7)..(7): 2'-O-methyl
  misc_feature (8)..(8): 2'-deoxy-2'Fluoro
  misc_feature (9)..(9): 2'-O-methyl
  misc_feature (10)..(11): 2'-deoxy-2'Fluoro
  misc_feature (12)..(12): 2'-O-methyl
  misc_feature (13)..(16): 2'-deoxy-2'Fluoro
  misc_feature (17)..(18): 2'-O-methyl
  misc_feature (19)..(19): 2'-deoxy-2'Fluoro
  misc_feature (1). .(19): ribonucleotide unmodified or modified as described for this sequence
gugugcgcgccgccucagctt

SEQ ID NO: 3027 - DNA, 21 bp, Artificial Sequence
  Description of Artificial Sequence: Target Sequence/siNA antisense region (stab22)
  misc_feature (21)..(21): 3'-3 attached terminal deoxyabasic moiety, inverted abasic, inverted nucleotide or other terminal cap that is optionally present
  misc_feature (20)..(20): Phosphorothioate or Phosphorodithioate 3'-Internucleotide Linkage (optionally present)
  misc_feature (1). .(19): ribonucleotide unmodified or modified as described for this sequence
gugugcgcgccgccucagctt

SEQ ID NO: 3028 - DNA, 21 bp, Artificial Sequence
  Description of Artificial Sequence: Target Sequence/siNA antisense region (stab25)
  misc_feature (4)..(4): 2'-deoxy-2'Fluoro
  misc_feature (5)..(5): 2'-O-methyl
  misc_feature (6)..(6): 2'-deoxy-2'Fluoro
  misc_feature (7)..(7): 2'-O-methyl
  misc_feature (8)..(8): 2'-deoxy-2'Fluoro
  misc_feature (9)..(9): 2'-O-methyl
  misc_feature (10)..(11): 2'-deoxy-2'Fluoro
  misc_feature (12)..(12): 2'-O-methyl
  misc_feature (13)..(16): 2'-deoxy-2'Fluoro
  misc_feature (17)..(18): 2'-O-methyl
  misc_feature (19)..(19): 2'-deoxy-2'Fluoro
  misc_feature (20)..(20): Phosphorothioate or Phosphorodithioate 3'-Internucleotide Linkage (optionally present)
  misc_feature (1)..(19): ribonucleotide unmodified or modified as described for this sequence
gugugcgcgccgccucagctt

SEQ ID NO: 3029 - RNA, 21 nt, Artificial Sequence
  Description of Artificial Sequence: Target Sequence/siNA antisense region (stab35)
  misc_feature (4)..(4): 2'-deoxy-2'Fluoro
  misc_feature (5)..(5): 2'-O-methyl
  misc_feature (6)..(6): 2'-deoxy-2'Fluoro
  misc_feature (7)..(7): 2'-O-methyl
  misc_feature (8)..(8): 2'-deoxy-2'Fluoro
  misc_feature (9)..(9): 2'-O-methyl
  misc_feature (10)..(11): 2'-deoxy-2'Fluoro
  misc_feature (12)..(12): 2'-O-methyl
  misc_feature (13)..(16): 2'-deoxy-2'Fluoro
  misc_feature (17)..(18): 2'-O-methyl
  misc_feature (19)..(19): 2'-deoxy-2'Fluoro
  misc_feature (20)..(21): 2'-O-methyl
gugugcgcgccgccucagcuu

SEQ ID NO: 3030 - RNA, 21 nt, Artificial Sequence
  Description of Artificial Sequence: Target Sequence/siNA antisense region (stab36)
  misc_feature (4)..(4): 2'-deoxy-2'Fluoro
  misc_feature (5)..(5): 2'-O-methyl
  misc_feature (6)..(6): 2'-deoxy-2'Fluoro
  misc_feature (7)..(7): 2'-O-methyl
  misc_feature (8)..(8): 2'-deoxy-2'Fluoro
  misc_feature (9)..(9): 2'-O-methyl
  misc_feature (10)..(11): 2'-deoxy-2'Fluoro
  misc_feature (12)..(12): 2'-O-methyl
  misc_feature (13)..(16): 2'-deoxy-2'Fluoro
  misc_feature (17)..(18): 2'-O-methyl
  misc_feature (19)..(19): 2'-deoxy-2'Fluoro
  misc_feature (20)..(21): 2'-O-methyl
gugugcgcgccgccucagcca

SEQ ID NO: 3031 - RNA, 19 nt, Artificial Sequence
  Description of Artificial Sequence: Target Sequence/siNA sense region
cucgagaagcuuggcgauc

SEQ ID NO: 3032 - RNA, 19 nt, Artificial Sequence
  Description of Artificial Sequence: Target Sequence/siNA antisense region
gaucgccaagcuucucgag

SEQ ID NO: 3033 - DNA, 21 bp, Artificial Sequence
  Description of Artificial Sequence: Target Sequence/siNA sense region (stab00)
  misc_feature (1). .(19): ribonucleotide unmodified or modified as described for this sequence
cucgagaagcuuggcgauctt

SEQ ID NO: 3034 - DNA, 21 bp, Artificial Sequence
  Description of Artificial Sequence: Target Sequence/siNA antisense region (stab00as)
  misc_feature (1). .(19): ribonucleotide unmodified or modified as described for this sequence
gaucgccaagcuucucgagtt

SEQ ID NO: 3035 - DNA, 21 bp, Artificial Sequence
  Description of Artificial Sequence: Target Sequence/siNA sense region (stab04)
  misc_feature (1)..(1): 5'-3 attached terminal deoxyabasic moiety, inverted abasic, inverted nucleotide or other terminal cap that is optionally present
  misc_feature (21)..(21): 3'-3 attached terminal deoxyabasic moiety, inverted abasic, inverted nucleotide or other terminal cap that is optionally present
  misc_feature (1)..(3): 2'-deoxy-2'Fluoro
  misc_feature (10)..(12): 2'-deoxy-2'Fluoro
  misc_feature (15)..(15): 2'-deoxy-2'Fluoro
  misc_feature (18)..(19): 2'-deoxy-2'Fluoro
  misc_feature (1)..(19): ribonucleotide unmodified or modified as described for this sequence
cucgagaagcuuggcgauctt

SEQ ID NO: 3036 - DNA, 21 bp, Artificial Sequence
  Description of Artificial Sequence: Target Sequence/siNA antisense region (stab05)
  misc_feature (3)..(4): 2'-deoxy-2'Fluoro
  misc_feature (6)..(7): 2'-deoxy-2'Fluoro
  misc_feature (11)..(16): 2'-deoxy-2'Fluoro
  misc_feature (20)..(20): Phosphorothioate or Phosphorodithioate 3'-Internucleotide Linkage (optionally present)
  misc_feature (1)..(19): ribonucleotide unmodified or modified as described for this sequence
gaucgccaagcuucucgagtt

SEQ ID NO: 3037 - DNA, 21 bp, Artificial Sequence
  Description of Artificial Sequence: Target Sequence/siNA sense region (stab07)
  misc_feature (1)..(1): 5'-3 attached terminal deoxyabasic moiety, inverted abasic, inverted nucleotide or other terminal cap that is optionally present
  misc_feature (21)..(21): 3'-3 attached terminal deoxyabasic moiety, inverted abasic, inverted nucleotide or other terminal cap that is optionally present
  misc_feature (1)..(3): 2'-deoxy-2'Fluoro
  misc_feature (10)..(12): 2'-deoxy-2'Fluoro
  misc_feature (15)..(15): 2'-deoxy-2'Fluoro
  misc_feature (18)..(19): 2'-deoxy-2'Fluoro
  misc_feature (1). .(19): ribonucleotide unmodified or modified as described for this sequence
cucgagaagcuuggcgauctt

SEQ ID NO: 3038 - DNA, 21 bp, Artificial Sequence
  Description of Artificial Sequence: Target Sequence/siNA antisense region (stab08)
  misc_feature (1)..(2): 2'-O-methyl
  misc_feature (3)..(4): 2'-deoxy-2'Fluoro
  misc_feature (5)..(5): 2'-O-methyl
  misc_feature (6)..(7): 2'-deoxy-2'Fluoro
  misc_feature (8)..(10): 2'-O-methyl
  misc_feature (11)..(16): 2'-deoxy-2'Fluoro
  misc_feature (17)..(19): 2'-O-methyl
  misc_feature (20)..(20): Phosphorothioate or Phosphorodithioate 3'-Internucleotide Linkage (optionally present)
  misc_feature (1). .(19): ribonucleotide unmodified or modified as described for this sequence
gaucgccaagcuucucgagtt

SEQ ID NO: 3039 - DNA, 21 bp, Artificial Sequence
  Description of Artificial Sequence: Target Sequence/siNA sense region (stab09)
  misc_feature (1)..(1): 5'-3 attached terminal deoxyabasic moiety, inverted abasic, inverted nucleotide or other terminal cap that is optionally present
  misc_feature (21)..(21): 3'-3 attached terminal deoxyabasic moiety, inverted abasic, inverted nucleotide or other terminal cap that is optionally present
  misc_feature (1). .(19): ribonucleotide unmodified or modified as described for this sequence
cucgagaagcuuggcgauctt

SEQ ID NO: 3040 - DNA, 21 bp, Artificial Sequence
  Description of Artificial Sequence: Target Sequence/siNA antisense region (stab10)
  misc_feature (20)..(20): Phosphorothioate or Phosphorodithioate 3'-Internucleotide Linkage (optionally present)
  misc_feature (1). .(19): ribonucleotide unmodified or modified as described for this sequence
gaucgccaagcuucucgagtt

SEQ ID NO: 3041 - DNA, 21 bp, Artificial Sequence
  Description of Artificial Sequence: Target Sequence/siNA antisense region (stab19)
  misc_feature (21)..(21): 3'-3 attached terminal deoxyabasic moiety, inverted abasic, inverted nucleotide or other terminal cap that is optionally present
  misc_feature (1)..(2): 2'-O-methyl
  misc_feature (3)..(4): 2'-deoxy-2'Fluoro
  misc_feature (5)..(5): 2'-O-methyl
  misc_feature (6)..(7): 2'-deoxy-2'Fluoro
  misc_feature (8)..(10): 2'-O-methyl
  misc_feature (11)..(16): 2'-deoxy-2'Fluoro
  misc_feature (17)..(19): 2'-O-methyl
  misc_feature (1). .(19): ribonucleotide unmodified or modified as described for this sequence
gaucgccaagcuucucgagtt

SEQ ID NO: 3042 - DNA, 21 bp, Artificial Sequence
  Description of Artificial Sequence: Target Sequence/siNA antisense region (stab22)
  misc_feature (21)..(21): 3'-3 attached terminal deoxyabasic moiety, inverted abasic, inverted nucleotide or other terminal cap that is optionally present
  misc_feature (20)..(20): Phosphorothioate or Phosphorodithioate 3'-Internucleotide Linkage (optionally present)
  misc_feature (1). .(19): ribonucleotide unmodified or modified as described for this sequence
gaucgccaagcuucucgagtt

SEQ ID NO: 3043 - DNA, 21 bp, Artificial Sequence
  Description of Artificial Sequence: Target Sequence/siNA antisense region (stab25)
  misc_feature (4)..(4): 2'-deoxy-2'Fluoro
  misc_feature (5)..(5): 2'-O-methyl
  misc_feature (6)..(7): 2'-deoxy-2'Fluoro
  misc_feature (8)..(10): 2'-O-methyl
  misc_feature (11)..(16): 2'-deoxy-2'Fluoro
  misc_feature (17)..(19): 2'-O-methyl
  misc_feature (20)..(20): Phosphorothioate or Phosphorodithioate 3'-Internucleotide Linkage (optionally present)
  misc_feature (1)..(19): ribonucleotide unmodified or modified as described for this sequence
gaucgccaagcuucucgagtt

SEQ ID NO: 3044 - RNA, 21 nt, Artificial Sequence
  Description of Artificial Sequence: Target Sequence/siNA antisense region (stab35)
  misc_feature (4)..(4): 2'-deoxy-2'Fluoro
  misc_feature (5)..(5): 2'-O-methyl
  misc_feature (6)..(7): 2'-deoxy-2'Fluoro
  misc_feature (8)..(10): 2'-O-methyl
  misc_feature (11)..(16): 2'-deoxy-2'Fluoro
  misc_feature (17)..(21): 2'-O-methyl
gaucgccaagcuucucgaguu

SEQ ID NO: 3045 - RNA, 21 nt, Artificial Sequence
  Description of Artificial Sequence: Target Sequence/siNA antisense region (stab36)
  misc_feature (4)..(4): 2'-deoxy-2'Fluoro
  misc_feature (5)..(5): 2'-O-methyl
  misc_feature (6)..(7): 2'-deoxy-2'Fluoro
  misc_feature (8)..(10): 2'-O-methyl
  misc_feature (11)..(16): 2'-deoxy-2'Fluoro
  misc_feature (17)..(21): 2'-O-methyl
gaucgccaagcuucucgagug

SEQ ID NO: 3046 - RNA, 19 nt, Artificial Sequence
  Description of Artificial Sequence: Target Sequence/siNA sense region
cgccggcugcugcacgacu

SEQ ID NO: 3047 - RNA, 19 nt, Artificial Sequence
  Description of Artificial Sequence: Target Sequence/siNA antisense region
agucgugcagcagccggcg

SEQ ID NO: 3048 - DNA, 21 bp, Artificial Sequence
  Description of Artificial Sequence: Target Sequence/siNA sense region (stab00)
  misc_feature (1). .(19): ribonucleotide unmodified or modified as described for this sequence
cgccggcugcugcacgacutt

SEQ ID NO: 3049 - DNA, 21 bp, Artificial Sequence
  Description of Artificial Sequence: Target Sequence/siNA antisense region (stab00as)
  misc_feature (1). .(19): ribonucleotide unmodified or modified as described for this sequence
agucgugcagcagccggcgtt

SEQ ID NO: 3050 - DNA, 21 bp, Artificial Sequence
  Description of Artificial Sequence: Target Sequence/siNA sense region (stab04)
  misc_feature (1)..(1): 5'-3 attached terminal deoxyabasic moiety, inverted abasic, inverted nucleotide or other terminal cap that is optionally present
  misc_feature (21)..(21): 3'-3 attached terminal deoxyabasic moiety, inverted abasic, inverted nucleotide or other terminal cap that is optionally present
  misc_feature (1)..(1): 2'-deoxy-2'Fluoro
  misc_feature (3)..(4): 2'-deoxy-2'Fluoro
  misc_feature (7)..(8): 2'-deoxy-2'Fluoro
  misc_feature (10)..(11): 2'-deoxy-2'Fluoro
  misc_feature (13)..(13): 2'-deoxy-2'Fluoro
  misc_feature (15)..(15): 2'-deoxy-2'Fluoro
  misc_feature (18)..(19): 2'-deoxy-2'Fluoro
  misc_feature (1)..(19): ribonucleotide unmodified or modified as described for this sequence
cgccggcugcugcacgacutt

SEQ ID NO: 3051 - DNA, 21 bp, Artificial Sequence
  Description of Artificial Sequence: Target Sequence/siNA antisense region (stab05)
  misc_feature (3)..(4): 2'-deoxy-2'Fluoro
  misc_feature (6)..(6): 2'-deoxy-2'Fluoro
  misc_feature (8)..(8): 2'-deoxy-2'Fluoro
  misc_feature (11)..(11): 2'-deoxy-2'Fluoro
  misc_feature (14)..(15): 2'-deoxy-2'Fluoro
  misc_feature (18)..(18): 2'-deoxy-2'Fluoro
  misc_feature (20)..(20): Phosphorothioate or Phosphorodithioate 3'-Internucleotide Linkage (optionally present)
  misc_feature (1)..(19): ribonucleotide unmodified or modified as described for this sequence
agucgugcagcagccggcgtt

SEQ ID NO: 3052 - DNA, 21 bp, Artificial Sequence
  Description of Artificial Sequence: Target Sequence/siNA sense region (stab07)
  misc_feature (1)..(1): 5'-3 attached terminal deoxyabasic moiety, inverted abasic, inverted nucleotide or other terminal cap that is optionally present
  misc_feature (21)..(21): 3'-3 attached terminal deoxyabasic moiety, inverted abasic, inverted nucleotide or other terminal cap that is optionally present
  misc_feature (1)..(1): 2'-deoxy-2'Fluoro
  misc_feature (3)..(4): 2'-deoxy-2'Fluoro
  misc_feature (7)..(8): 2'-deoxy-2'Fluoro
  misc_feature (10)..(11): 2'-deoxy-2'Fluoro
  misc_feature (13)..(13): 2'-deoxy-2'Fluoro
  misc_feature (15)..(15): 2'-deoxy-2'Fluoro
  misc_feature (18)..(19): 2'-deoxy-2'Fluoro
  misc_feature (1). .(19): ribonucleotide unmodified or modified as described for this sequence
cgccggcugcugcacgacutt

SEQ ID NO: 3053 - DNA, 21 bp, Artificial Sequence
  Description of Artificial Sequence: Target Sequence/siNA antisense region (stab08)
  misc_feature (1)..(2): 2'-O-methyl
  misc_feature (3)..(4): 2'-deoxy-2'Fluoro
  misc_feature (5)..(5): 2'-O-methyl
  misc_feature (6)..(6): 2'-deoxy-2'Fluoro
  misc_feature (7)..(7): 2'-O-methyl
  misc_feature (8)..(8): 2'-deoxy-2'Fluoro
  misc_feature (9)..(10): 2'-O-methyl
  misc_feature (11)..(11): 2'-deoxy-2'Fluoro
  misc_feature (12)..(13): 2'-O-methyl
  misc_feature (14)..(15): 2'-deoxy-2'Fluoro
  misc_feature (16)..(17): 2'-O-methyl
  misc_feature (18)..(18): 2'-deoxy-2'Fluoro
  misc_feature (19)..(19): 2'-O-methyl
  misc_feature (20)..(20): Phosphorothioate or Phosphorodithioate 3'-Internucleotide Linkage (optionally present)
  misc_feature (1). .(19): ribonucleotide unmodified or modified as described for this sequence
agucgugcagcagccggcgtt

SEQ ID NO: 3054 - DNA, 21 bp, Artificial Sequence
  Description of Artificial Sequence: Target Sequence/siNA sense region (stab09)
  misc_feature (1)..(1): 5'-3 attached terminal deoxyabasic moiety, inverted abasic, inverted nucleotide or other terminal cap that is optionally present
  misc_feature (21)..(21): 3'-3 attached terminal deoxyabasic moiety, inverted abasic, inverted nucleotide or other terminal cap that is optionally present
  misc_feature (1). .(19): ribonucleotide unmodified or modified as described for this sequence
cgccggcugcugcacgacutt

SEQ ID NO: 3055 - DNA, 21 bp, Artificial Sequence
  Description of Artificial Sequence: Target Sequence/siNA antisense region (stab10)
  misc_feature (20)..(20): Phosphorothioate or Phosphorodithioate 3'-Internucleotide Linkage (optionally present)
  misc_feature (1). .(19): ribonucleotide unmodified or modified as described for this sequence
agucgugcagcagccggcgtt

SEQ ID NO: 3056 - DNA, 21 bp, Artificial Sequence
  Description of Artificial Sequence: Target Sequence/siNA antisense region (stab19)
  misc_feature (21)..(21): 3'-3 attached terminal deoxyabasic moiety, inverted abasic, inverted nucleotide or other terminal cap that is optionally present
  misc_feature (1)..(2): 2'-O-methyl
  misc_feature (3)..(4): 2'-deoxy-2'Fluoro
  misc_feature (5)..(5): 2'-O-methyl
  misc_feature (6)..(6): 2'-deoxy-2'Fluoro
  misc_feature (7)..(7): 2'-O-methyl
  misc_feature (8)..(8): 2'-deoxy-2'Fluoro
  misc_feature (9)..(10): 2'-O-methyl
  misc_feature (11)..(11): 2'-deoxy-2'Fluoro
  misc_feature (12)..(13): 2'-O-methyl
  misc_feature (14)..(15): 2'-deoxy-2'Fluoro
  misc_feature (16)..(17): 2'-O-methyl
  misc_feature (18)..(18): 2'-deoxy-2'Fluoro
  misc_feature (19)..(19): 2'-O-methyl
  misc_feature (1). .(19): ribonucleotide unmodified or modified as described for this sequence
agucgugcagcagccggcgtt

SEQ ID NO: 3057 - DNA, 21 bp, Artificial Sequence
  Description of Artificial Sequence: Target Sequence/siNA antisense region (stab22)
  misc_feature (21)..(21): 3'-3 attached terminal deoxyabasic moiety, inverted abasic, inverted nucleotide or other terminal cap that is optionally present
  misc_feature (20)..(20): Phosphorothioate or Phosphorodithioate 3'-Internucleotide Linkage (optionally present)
  misc_feature (1). .(19): ribonucleotide unmodified or modified as described for this sequence
agucgugcagcagccggcgtt

SEQ ID NO: 3058 - DNA, 21 bp, Artificial Sequence
  Description of Artificial Sequence: Target Sequence/siNA antisense region (stab25)
  misc_feature (4)..(4): 2'-deoxy-2'Fluoro
  misc_feature (5)..(5): 2'-O-methyl
  misc_feature (6)..(6): 2'-deoxy-2'Fluoro
  misc_feature (7)..(7): 2'-O-methyl
  misc_feature (8)..(8): 2'-deoxy-2'Fluoro
  misc_feature (9)..(10): 2'-O-methyl
  misc_feature (11)..(11): 2'-deoxy-2'Fluoro
  misc_feature (12)..(13): 2'-O-methyl
  misc_feature (14)..(15): 2'-deoxy-2'Fluoro
  misc_feature (16)..(17): 2'-O-methyl
  misc_feature (18)..(18): 2'-deoxy-2'Fluoro
  misc_feature (19)..(19): 2'-O-methyl
  misc_feature (20)..(20): Phosphorothioate or Phosphorodithioate 3'-Internucleotide Linkage (optionally present)
  misc_feature (1)..(19): ribonucleotide unmodified or modified as described for this sequence
agucgugcagcagccggcgtt

SEQ ID NO: 3059 - RNA, 21 nt, Artificial Sequence
  Description of Artificial Sequence: Target Sequence/siNA antisense region (stab35)
  misc_feature (4)..(4): 2'-deoxy-2'Fluoro
  misc_feature (5)..(5): 2'-O-methyl
  misc_feature (6)..(6): 2'-deoxy-2'Fluoro
  misc_feature (7)..(7): 2'-O-methyl
  misc_feature (8)..(8): 2'-deoxy-2'Fluoro
  misc_feature (9)..(10): 2'-O-methyl
  misc_feature (11)..(11): 2'-deoxy-2'Fluoro
  misc_feature (12)..(13): 2'-O-methyl
  misc_feature (14)..(15): 2'-deoxy-2'Fluoro
  misc_feature (16)..(17): 2'-O-methyl
  misc_feature (18)..(18): 2'-deoxy-2'Fluoro
  misc_feature (19)..(21): 2'-O-methyl
agucgugcagcagccggcguu

SEQ ID NO: 3060 - RNA, 21 nt, Artificial Sequence
  Description of Artificial Sequence: Target Sequence/siNA antisense region (stab36)
  misc_feature (4)..(4): 2'-deoxy-2'Fluoro
  misc_feature (5)..(5): 2'-O-methyl
  misc_feature (6)..(6): 2'-deoxy-2'Fluoro
  misc_feature (7)..(7): 2'-O-methyl
  misc_feature (8)..(8): 2'-deoxy-2'Fluoro
  misc_feature (9)..(10): 2'-O-methyl
  misc_feature (11)..(11): 2'-deoxy-2'Fluoro
  misc_feature (12)..(13): 2'-O-methyl
  misc_feature (14)..(15): 2'-deoxy-2'Fluoro
  misc_feature (16)..(17): 2'-O-methyl
  misc_feature (18)..(18): 2'-deoxy-2'Fluoro
  misc_feature (19)..(21): 2'-O-methyl
agucgugcagcagccggcgau

SEQ ID NO: 3061 - RNA, 19 nt, Artificial Sequence
  Description of Artificial Sequence: Target Sequence/siNA sense region
ugucagcagaugcucaugc

SEQ ID NO: 3062 - RNA, 19 nt, Artificial Sequence
  Description of Artificial Sequence: Target Sequence/siNA antisense region
gcaugagcaucugcugaca

SEQ ID NO: 3063 - DNA, 21 bp, Artificial Sequence
  Description of Artificial Sequence: Target Sequence/siNA sense region (stab00)
  misc_feature (1). .(19): ribonucleotide unmodified or modified as described for this sequence
ugucagcagaugcucaugctt

SEQ ID NO: 3064 - DNA, 21 bp, Artificial Sequence
  Description of Artificial Sequence: Target Sequence/siNA antisense region (stab00as)
  misc_feature (1). .(19): ribonucleotide unmodified or modified as described for this sequence
gcaugagcaucugcugacatt

SEQ ID NO: 3065 - DNA, 21 bp, Artificial Sequence
  Description of Artificial Sequence: Target Sequence/siNA sense region (stab04)
  misc_feature (1)..(1): 5'-3 attached terminal deoxyabasic moiety, inverted abasic, inverted nucleotide or other terminal cap that is optionally present
  misc_feature (21)..(21): 3'-3 attached terminal deoxyabasic moiety, inverted abasic, inverted nucleotide or other terminal cap that is optionally present
  misc_feature (1)..(1): 2'-deoxy-2'Fluoro
  misc_feature (3)..(4): 2'-deoxy-2'Fluoro
  misc_feature (7)..(7): 2'-deoxy-2'Fluoro
  misc_feature (11)..(11): 2'-deoxy-2'Fluoro
  misc_feature (13)..(15): 2'-deoxy-2'Fluoro
  misc_feature (17)..(17): 2'-deoxy-2'Fluoro
  misc_feature (19)..(19): 2'-deoxy-2'Fluoro
  misc_feature (1)..(19): ribonucleotide unmodified or modified as described for this sequence
ugucagcagaugcucaugctt

SEQ ID NO: 3066 - DNA, 21 bp, Artificial Sequence
  Description of Artificial Sequence: Target Sequence/siNA antisense region (stab05)
  misc_feature (2)..(2): 2'-deoxy-2'Fluoro
  misc_feature (4)..(4): 2'-deoxy-2'Fluoro
  misc_feature (8)..(8): 2'-deoxy-2'Fluoro
  misc_feature (10)..(12): 2'-deoxy-2'Fluoro
  misc_feature (14)..(15): 2'-deoxy-2'Fluoro
  misc_feature (18)..(18): 2'-deoxy-2'Fluoro
  misc_feature (20)..(20): Phosphorothioate or Phosphorodithioate 3'-Internucleotide Linkage (optionally present)
  misc_feature (1)..(19): ribonucleotide unmodified or modified as described for this sequence
gcaugagcaucugcugacatt

SEQ ID NO: 3067 - DNA, 21 bp, Artificial Sequence
  Description of Artificial Sequence: Target Sequence/siNA sense region (stab07)
  misc_feature (1)..(1): 5'-3 attached terminal deoxyabasic moiety, inverted abasic, inverted nucleotide or other terminal cap that is optionally present
  misc_feature (21)..(21): 3'-3 attached terminal deoxyabasic moiety, inverted abasic, inverted nucleotide or other terminal cap that is optionally present
  misc_feature (1)..(1): 2'-deoxy-2'Fluoro
  misc_feature (3)..(4): 2'-deoxy-2'Fluoro
  misc_feature (7)..(7): 2'-deoxy-2'Fluoro
  misc_feature (11)..(11): 2'-deoxy-2'Fluoro
  misc_feature (13)..(15): 2'-deoxy-2'Fluoro
  misc_feature (17)..(17): 2'-deoxy-2'Fluoro
  misc_feature (19)..(19): 2'-deoxy-2'Fluoro
  misc_feature (1). .(19): ribonucleotide unmodified or modified as described for this sequence
ugucagcagaugcucaugctt

SEQ ID NO: 3068 - DNA, 21 bp, Artificial Sequence
  Description of Artificial Sequence: Target Sequence/siNA antisense region (stab08)
  misc_feature (1)..(1): 2'-O-methyl
  misc_feature (2)..(2): 2'-deoxy-2'Fluoro
  misc_feature (3)..(3): 2'-O-methyl
  misc_feature (4)..(4): 2'-deoxy-2'Fluoro
  misc_feature (5)..(7): 2'-O-methyl
  misc_feature (8)..(8): 2'-deoxy-2'Fluoro
  misc_feature (9)..(9): 2'-O-methyl
  misc_feature (10)..(12): 2'-deoxy-2'Fluoro
  misc_feature (13)..(13): 2'-O-methyl
  misc_feature (14)..(15): 2'-deoxy-2'Fluoro
  misc_feature (16)..(17): 2'-O-methyl
  misc_feature (18)..(18): 2'-deoxy-2'Fluoro
  misc_feature (19)..(19): 2'-O-methyl
  misc_feature (20)..(20): Phosphorothioate or Phosphorodithioate 3'-Internucleotide Linkage (optionally present)
  misc_feature (1). .(19): ribonucleotide unmodified or modified as described for this sequence
gcaugagcaucugcugacatt

SEQ ID NO: 3069 - DNA, 21 bp, Artificial Sequence
  Description of Artificial Sequence: Target Sequence/siNA sense region (stab09)
  misc_feature (1)..(1): 5'-3 attached terminal deoxyabasic moiety, inverted abasic, inverted nucleotide or other terminal cap that is optionally present
  misc_feature (21)..(21): 3'-3 attached terminal deoxyabasic moiety, inverted abasic, inverted nucleotide or other terminal cap that is optionally present
  misc_feature (1). .(19): ribonucleotide unmodified or modified as described for this sequence
ugucagcagaugcucaugctt

SEQ ID NO: 3070 - DNA, 21 bp, Artificial Sequence
  Description of Artificial Sequence: Target Sequence/siNA antisense region (stab10)
  misc_feature (20)..(20): Phosphorothioate or Phosphorodithioate 3'-Internucleotide Linkage (optionally present)
  misc_feature (1). .(19): ribonucleotide unmodified or modified as described for this sequence
gcaugagcaucugcugacatt

SEQ ID NO: 3071 - DNA, 21 bp, Artificial Sequence
  Description of Artificial Sequence: Target Sequence/siNA antisense region (stab19)
  misc_feature (21)..(21): 3'-3 attached terminal deoxyabasic moiety, inverted abasic, inverted nucleotide or other terminal cap that is optionally present
  misc_feature (1)..(1): 2'-O-methyl
  misc_feature (2)..(2): 2'-deoxy-2'Fluoro
  misc_feature (3)..(3): 2'-O-methyl
  misc_feature (4)..(4): 2'-deoxy-2'Fluoro
  misc_feature (5)..(7): 2'-O-methyl
  misc_feature (8)..(8): 2'-deoxy-2'Fluoro
  misc_feature (9)..(9): 2'-O-methyl
  misc_feature (10)..(12): 2'-deoxy-2'Fluoro
  misc_feature (13)..(13): 2'-O-methyl
  misc_feature (14)..(15): 2'-deoxy-2'Fluoro
  misc_feature (16)..(17): 2'-O-methyl
  misc_feature (18)..(18): 2'-deoxy-2'Fluoro
  misc_feature (19)..(19): 2'-O-methyl
  misc_feature (1). .(19): ribonucleotide unmodified or modified as described for this sequence
gcaugagcaucugcugacatt

SEQ ID NO: 3072 - DNA, 21 bp, Artificial Sequence
  Description of Artificial Sequence: Target Sequence/siNA antisense region (stab22)
  misc_feature (21)..(21): 3'-3 attached terminal deoxyabasic moiety, inverted abasic, inverted nucleotide or other terminal cap that is optionally present
  misc_feature (20)..(20): Phosphorothioate or Phosphorodithioate 3'-Internucleotide Linkage (optionally present)
  misc_feature (1). .(19): ribonucleotide unmodified or modified as described for this sequence
gcaugagcaucugcugacatt

SEQ ID NO: 3073 - DNA, 21 bp, Artificial Sequence
  Description of Artificial Sequence: Target Sequence/siNA antisense region (stab25)
  misc_feature (4)..(4): 2'-deoxy-2'Fluoro
  misc_feature (5)..(7): 2'-O-methyl
  misc_feature (8)..(8): 2'-deoxy-2'Fluoro
  misc_feature (9)..(9): 2'-O-methyl
  misc_feature (10)..(12): 2'-deoxy-2'Fluoro
  misc_feature (13)..(13): 2'-O-methyl
  misc_feature (14)..(15): 2'-deoxy-2'Fluoro
  misc_feature (16)..(17): 2'-O-methyl
  misc_feature (18)..(18): 2'-deoxy-2'Fluoro
  misc_feature (19)..(19): 2'-O-methyl
  misc_feature (20)..(20): Phosphorothioate or Phosphorodithioate 3'-Internucleotide Linkage (optionally present)
  misc_feature (1)..(19): ribonucleotide unmodified or modified as described for this sequence
gcaugagcaucugcugacatt

SEQ ID NO: 3074 - RNA, 21 nt, Artificial Sequence
  Description of Artificial Sequence: Target Sequence/siNA antisense region (stab35)
  misc_feature (4)..(4): 2'-deoxy-2'Fluoro
  misc_feature (5)..(7): 2'-O-methyl
  misc_feature (8)..(8): 2'-deoxy-2'Fluoro
  misc_feature (9)..(9): 2'-O-methyl
  misc_feature (10)..(12): 2'-deoxy-2'Fluoro
  misc_feature (13)..(13): 2'-O-methyl
  misc_feature (14)..(15): 2'-deoxy-2'Fluoro
  misc_feature (16)..(17): 2'-O-methyl
  misc_feature (18)..(18): 2'-deoxy-2'Fluoro
  misc_feature (19)..(21): 2'-O-methyl
gcaugagcaucugcugacauu

SEQ ID NO: 3075 - RNA, 21 nt, Artificial Sequence
  Description of Artificial Sequence: Target Sequence/siNA antisense region (stab36)
  misc_feature (4)..(4): 2'-deoxy-2'Fluoro
  misc_feature (5)..(7): 2'-O-methyl
  misc_feature (8)..(8): 2'-deoxy-2'Fluoro
  misc_feature (9)..(9): 2'-O-methyl
  misc_feature (10)..(12): 2'-deoxy-2'Fluoro
  misc_feature (13)..(13): 2'-O-methyl
  misc_feature (14)..(15): 2'-deoxy-2'Fluoro
  misc_feature (16)..(17): 2'-O-methyl
  misc_feature (18)..(18): 2'-deoxy-2'Fluoro
  misc_feature (19)..(21): 2'-O-methyl
gcaugagcaucugcugacagu

SEQ ID NO: 3076 - RNA, 19 nt, Artificial Sequence
  Description of Artificial Sequence: Target Sequence/siNA sense region
cgccugggcggugggacca

SEQ ID NO: 3077 - RNA, 19 nt, Artificial Sequence
  Description of Artificial Sequence: Target Sequence/siNA antisense region
uggucccaccgcccaggcg

SEQ ID NO: 3078 - DNA, 21 bp, Artificial Sequence
  Description of Artificial Sequence: Target Sequence/siNA sense region (stab00)
  misc_feature (1). .(19): ribonucleotide unmodified or modified as described for this sequence
cgccugggcggugggaccatt

SEQ ID NO: 3079 - DNA, 21 bp, Artificial Sequence
  Description of Artificial Sequence: Target Sequence/siNA antisense region (stab00as)
  misc_feature (1). .(19): ribonucleotide unmodified or modified as described for this sequence
uggucccaccgcccaggcgtt

SEQ ID NO: 3080 - DNA, 21 bp, Artificial Sequence
  Description of Artificial Sequence: Target Sequence/siNA sense region (stab04)
  misc_feature (1)..(1): 5'-3 attached terminal deoxyabasic moiety, inverted abasic, inverted nucleotide or other terminal cap that is optionally present
  misc_feature (21)..(21): 3'-3 attached terminal deoxyabasic moiety, inverted abasic, inverted nucleotide or other terminal cap that is optionally present
  misc_feature (1)..(1): 2'-deoxy-2'Fluoro
  misc_feature (3)..(5): 2'-deoxy-2'Fluoro
  misc_feature (9)..(9): 2'-deoxy-2'Fluoro
  misc_feature (12)..(12): 2'-deoxy-2'Fluoro
  misc_feature (17)..(18): 2'-deoxy-2'Fluoro
  misc_feature (1)..(19): ribonucleotide unmodified or modified as described for this sequence
cgccugggcggugggaccatt

SEQ ID NO: 3081 - DNA, 21 bp, Artificial Sequence
  Description of Artificial Sequence: Target Sequence/siNA antisense region (stab05)
  misc_feature (1)..(1): 2'-deoxy-2'Fluoro
  misc_feature (4)..(7): 2'-deoxy-2'Fluoro
  misc_feature (9)..(10): 2'-deoxy-2'Fluoro
  misc_feature (12)..(14): 2'-deoxy-2'Fluoro
  misc_feature (18)..(18): 2'-deoxy-2'Fluoro
  misc_feature (20)..(20): Phosphorothioate or Phosphorodithioate 3'-Internucleotide Linkage (optionally present)
  misc_feature (1)..(19): ribonucleotide unmodified or modified as described for this sequence
uggucccaccgcccaggcgtt

SEQ ID NO: 3082 - DNA, 21 bp, Artificial Sequence
  Description of Artificial Sequence: Target Sequence/siNA sense region (stab07)
  misc_feature (1)..(1): 5'-3 attached terminal deoxyabasic moiety, inverted abasic, inverted nucleotide or other terminal cap that is optionally present
  misc_feature (21)..(21): 3'-3 attached terminal deoxyabasic moiety, inverted abasic, inverted nucleotide or other terminal cap that is optionally present
  misc_feature (1)..(1): 2'-deoxy-2'Fluoro
  misc_feature (3)..(5): 2'-deoxy-2'Fluoro
  misc_feature (9)..(9): 2'-deoxy-2'Fluoro
  misc_feature (12)..(12): 2'-deoxy-2'Fluoro
  misc_feature (17)..(18): 2'-deoxy-2'Fluoro
  misc_feature (1). .(19): ribonucleotide unmodified or modified as described for this sequence
cgccugggcggugggaccatt

SEQ ID NO: 3083 - DNA, 21 bp, Artificial Sequence
  Description of Artificial Sequence: Target Sequence/siNA antisense region (stab08)
  misc_feature (1)..(1): 2'-deoxy-2'Fluoro
  misc_feature (2)..(3): 2'-O-methyl
  misc_feature (4)..(7): 2'-deoxy-2'Fluoro
  misc_feature (8)..(8): 2'-O-methyl
  misc_feature (9)..(10): 2'-deoxy-2'Fluoro
  misc_feature (11)..(11): 2'-O-methyl
  misc_feature (12)..(14): 2'-deoxy-2'Fluoro
  misc_feature (15)..(17): 2'-O-methyl
  misc_feature (18)..(18): 2'-deoxy-2'Fluoro
  misc_feature (19)..(19): 2'-O-methyl
  misc_feature (20)..(20): Phosphorothioate or Phosphorodithioate 3'-Internucleotide Linkage (optionally present)
  misc_feature (1). .(19): ribonucleotide unmodified or modified as described for this sequence
uggucccaccgcccaggcgtt

SEQ ID NO: 3084 - DNA, 21 bp, Artificial Sequence
  Description of Artificial Sequence: Target Sequence/siNA sense region (stab09)
  misc_feature (1)..(1): 5'-3 attached terminal deoxyabasic moiety, inverted abasic, inverted nucleotide or other terminal cap that is optionally present
  misc_feature (21)..(21): 3'-3 attached terminal deoxyabasic moiety, inverted abasic, inverted nucleotide or other terminal cap that is optionally present
  misc_feature (1). .(19): ribonucleotide unmodified or modified as described for this sequence
cgccugggcggugggaccatt

SEQ ID NO: 3085 - DNA, 21 bp, Artificial Sequence
  Description of Artificial Sequence: Target Sequence/siNA antisense region (stab10)
  misc_feature (20)..(20): Phosphorothioate or Phosphorodithioate 3'-Internucleotide Linkage (optionally present)
  misc_feature (1). .(19): ribonucleotide unmodified or modified as described for this sequence
uggucccaccgcccaggcgtt

SEQ ID NO: 3086 - DNA, 21 bp, Artificial Sequence
  Description of Artificial Sequence: Target Sequence/siNA antisense region (stab19)
  misc_feature (21)..(21): 3'-3 attached terminal deoxyabasic moiety, inverted abasic, inverted nucleotide or other terminal cap that is optionally present
  misc_feature (1)..(1): 2'-deoxy-2'Fluoro
  misc_feature (2)..(3): 2'-O-methyl
  misc_feature (4)..(7): 2'-deoxy-2'Fluoro
  misc_feature (8)..(8): 2'-O-methyl
  misc_feature (9)..(10): 2'-deoxy-2'Fluoro
  misc_feature (11)..(11): 2'-O-methyl
  misc_feature (12)..(14): 2'-deoxy-2'Fluoro
  misc_feature (15)..(17): 2'-O-methyl
  misc_feature (18)..(18): 2'-deoxy-2'Fluoro
  misc_feature (19)..(19): 2'-O-methyl
  misc_feature (1). .(19): ribonucleotide unmodified or modified as described for this sequence
uggucccaccgcccaggcgtt

SEQ ID NO: 3087 - DNA, 21 bp, Artificial Sequence
  Description of Artificial Sequence: Target Sequence/siNA antisense region (stab22)
  misc_feature (21)..(21): 3'-3 attached terminal deoxyabasic moiety, inverted abasic, inverted nucleotide or other terminal cap that is optionally present
  misc_feature (20)..(20): Phosphorothioate or Phosphorodithioate 3'-Internucleotide Linkage (optionally present)
  misc_feature (1). .(19): ribonucleotide unmodified or modified as described for this sequence
uggucccaccgcccaggcgtt

SEQ ID NO: 3088 - DNA, 21 bp, Artificial Sequence
  Description of Artificial Sequence: Target Sequence/siNA antisense region (stab25)
  misc_feature (4)..(7): 2'-deoxy-2'Fluoro
  misc_feature (8)..(8): 2'-O-methyl
  misc_feature (9)..(10): 2'-deoxy-2'Fluoro
  misc_feature (11)..(11): 2'-O-methyl
  misc_feature (12)..(14): 2'-deoxy-2'Fluoro
  misc_feature (15)..(17): 2'-O-methyl
  misc_feature (18)..(18): 2'-deoxy-2'Fluoro
  misc_feature (19)..(19): 2'-O-methyl
  misc_feature (20)..(20): Phosphorothioate or Phosphorodithioate 3'-Internucleotide Linkage (optionally present)
  misc_feature (1)..(19): ribonucleotide unmodified or modified as described for this sequence
uggucccaccgcccaggcgtt

SEQ ID NO: 3089 - RNA, 21 nt, Artificial Sequence
  Description of Artificial Sequence: Target Sequence/siNA antisense region (stab35)
  misc_feature (4)..(7): 2'-deoxy-2'Fluoro
  misc_feature (8)..(8): 2'-O-methyl
  misc_feature (9)..(10): 2'-deoxy-2'Fluoro
  misc_feature (11)..(11): 2'-O-methyl
  misc_feature (12)..(14): 2'-deoxy-2'Fluoro
  misc_feature (15)..(17): 2'-O-methyl
  misc_feature (18)..(18): 2'-deoxy-2'Fluoro
  misc_feature (19)..(21): 2'-O-methyl
uggucccaccgcccaggcguu

SEQ ID NO: 3090 - RNA, 21 nt, Artificial Sequence
  Description of Artificial Sequence: Target Sequence/siNA antisense region (stab36)
  misc_feature (4)..(7): 2'-deoxy-2'Fluoro
  misc_feature (8)..(8): 2'-O-methyl
  misc_feature (9)..(10): 2'-deoxy-2'Fluoro
  misc_feature (11)..(11): 2'-O-methyl
  misc_feature (12)..(14): 2'-deoxy-2'Fluoro
  misc_feature (15)..(17): 2'-O-methyl
  misc_feature (18)..(18): 2'-deoxy-2'Fluoro
  misc_feature (19)..(21): 2'-O-methyl
uggucccaccgcccaggcgca

SEQ ID NO: 3091 - RNA, 19 nt, Artificial Sequence
  Description of Artificial Sequence: Target Sequence/siNA sense region
acugucacuuccagcuaga

SEQ ID NO: 3092 - RNA, 19 nt, Artificial Sequence
  Description of Artificial Sequence: Target Sequence/siNA antisense region
ucuagcuggaagugacagu

SEQ ID NO: 3093 - DNA, 21 bp, Artificial Sequence
  Description of Artificial Sequence: Target Sequence/siNA sense region (stab00)
  misc_feature (1). .(19): ribonucleotide unmodified or modified as described for this sequence
acugucacuuccagcuagatt

SEQ ID NO: 3094 - DNA, 21 bp, Artificial Sequence
  Description of Artificial Sequence: Target Sequence/siNA antisense region (stab00as)
  misc_feature (1). .(19): ribonucleotide unmodified or modified as described for this sequence
ucuagcuggaagugacagutt

SEQ ID NO: 3095 - DNA, 21 bp, Artificial Sequence
  Description of Artificial Sequence: Target Sequence/siNA sense region (stab04)
  misc_feature (1)..(1): 5'-3 attached terminal deoxyabasic moiety, inverted abasic, inverted nucleotide or other terminal cap that is optionally present
  misc_feature (21)..(21): 3'-3 attached terminal deoxyabasic moiety, inverted abasic, inverted nucleotide or other terminal cap that is optionally present
  misc_feature (2)..(3): 2'-deoxy-2'Fluoro
  misc_feature (5)..(6): 2'-deoxy-2'Fluoro
  misc_feature (8)..(12): 2'-deoxy-2'Fluoro
  misc_feature (15)..(16): 2'-deoxy-2'Fluoro
  misc_feature (1). .(19): ribonucleotide unmodified or modified as described for this sequence
acugucacuuccagcuagatt

SEQ ID NO: 3096 - DNA, 21 bp, Artificial Sequence
  Description of Artificial Sequence: Target Sequence/siNA antisense region (stab05)
  misc_feature (1)..(3): 2'-deoxy-2'Fluoro
  misc_feature (6)..(7): 2'-deoxy-2'Fluoro
  misc_feature (13)..(13): 2'-deoxy-2'Fluoro
  misc_feature (16)..(16): 2'-deoxy-2'Fluoro
  misc_feature (19)..(19): 2'-deoxy-2'Fluoro
  misc_feature (20)..(20): Phosphorothioate or Phosphorodithioate 3'-Internucleotide Linkage (optionally present)
  misc_feature (1). .(19): ribonucleotide unmodified or modified as described for this sequence
ucuagcuggaagugacagutt

SEQ ID NO: 3097 - DNA, 21 bp, Artificial Sequence
  Description of Artificial Sequence: Target Sequence/siNA sense region (stab07)
  misc_feature (1)..(1): 5'-3 attached terminal deoxyabasic moiety, inverted abasic, inverted nucleotide or other terminal cap that is optionally present
  misc_feature (21)..(21): 3'-3 attached terminal deoxyabasic moiety, inverted abasic, inverted nucleotide or other terminal cap that is optionally present
  misc_feature (2)..(3): 2'-deoxy-2'Fluoro
  misc_feature (5)..(6): 2'-deoxy-2'Fluoro
  misc_feature (8)..(12): 2'-deoxy-2'Fluoro
  misc_feature (15)..(16): 2'-deoxy-2'Fluoro
  misc_feature (1). .(19): ribonucleotide unmodified or modified as described for this sequence
acugucacuuccagcuagatt

SEQ ID NO: 3098 - DNA, 21 bp, Artificial Sequence
  Description of Artificial Sequence: Target Sequence/siNA antisense region (stab08)
  misc_feature (1)..(3): 2'-deoxy-2'Fluoro
  misc_feature (4)..(5): 2'-O-methyl
  misc_feature (6)..(7): 2'-deoxy-2'Fluoro
  misc_feature (8)..(12): 2'-O-methyl
  misc_feature (13)..(13): 2'-deoxy-2'Fluoro
  misc_feature (14)..(15): 2'-O-methyl
  misc_feature (16)..(16): 2'-deoxy-2'Fluoro
  misc_feature (17)..(18): 2'-O-methyl
  misc_feature (19)..(19): 2'-deoxy-2'Fluoro
  misc_feature (20)..(20): Phosphorothioate or Phosphorodithioate 3'-Internucleotide Linkage (optionally present)
  misc_feature (1). .(19): ribonucleotide unmodified or modified as described for this sequence
ucuagcuggaagugacagutt

SEQ ID NO: 3099 - DNA, 21 bp, Artificial Sequence
  Description of Artificial Sequence: Target Sequence/siNA sense region (stab09)
  misc_feature (1)..(1): 5'-3 attached terminal deoxyabasic moiety, inverted abasic, inverted nucleotide or other terminal cap that is optionally present
  misc_feature (21)..(21): 3'-3 attached terminal deoxyabasic moiety, inverted abasic, inverted nucleotide or other terminal cap that is optionally present
  misc_feature (1). .(19): ribonucleotide unmodified or modified as described for this sequence
acugucacuuccagcuagatt

SEQ ID NO: 3100 - DNA, 21 bp, Artificial Sequence
  Description of Artificial Sequence: Target Sequence/siNA antisense region (stab10)
  misc_feature (20)..(20): Phosphorothioate or Phosphorodithioate 3'-Internucleotide Linkage (optionally present)
  misc_feature (1). .(19): ribonucleotide unmodified or modified as described for this sequence
ucuagcuggaagugacagutt

SEQ ID NO: 3101 - DNA, 21 bp, Artificial Sequence
  Description of Artificial Sequence: Target Sequence/siNA antisense region (stab19)
  misc_feature (21)..(21): 3'-3 attached terminal deoxyabasic moiety, inverted abasic, inverted nucleotide or other terminal cap that is optionally present
  misc_feature (1)..(3): 2'-deoxy-2'Fluoro
  misc_feature (4)..(5): 2'-O-methyl
  misc_feature (6)..(7): 2'-deoxy-2'Fluoro
  misc_feature (8)..(12): 2'-O-methyl
  misc_feature (13)..(13): 2'-deoxy-2'Fluoro
  misc_feature (14)..(15): 2'-O-methyl
  misc_feature (16)..(16): 2'-deoxy-2'Fluoro
  misc_feature (17)..(18): 2'-O-methyl
  misc_feature (19)..(19): 2'-deoxy-2'Fluoro
  misc_feature (1). .(19): ribonucleotide unmodified or modified as described for this sequence
ucuagcuggaagugacagutt

SEQ ID NO: 3102 - DNA, 21 bp, Artificial Sequence
  Description of Artificial Sequence: Target Sequence/siNA antisense region (stab22)
  misc_feature (21)..(21): 3'-3 attached terminal deoxyabasic moiety, inverted abasic, inverted nucleotide or other terminal cap that is optionally present
  misc_feature (20)..(20): Phosphorothioate or Phosphorodithioate 3'-Internucleotide Linkage (optionally present)
  misc_feature (1). .(19): ribonucleotide unmodified or modified as described for this sequence
ucuagcuggaagugacagutt

SEQ ID NO: 3103 - DNA, 21 bp, Artificial Sequence
  Description of Artificial Sequence: Target Sequence/siNA antisense region (stab25)
  misc_feature (4)..(5): 2'-O-methyl
  misc_feature (6)..(7): 2'-deoxy-2'Fluoro
  misc_feature (8)..(12): 2'-O-methyl
  misc_feature (13)..(13): 2'-deoxy-2'Fluoro
  misc_feature (14)..(15): 2'-O-methyl
  misc_feature (16)..(16): 2'-deoxy-2'Fluoro
  misc_feature (17)..(18): 2'-O-methyl
  misc_feature (19)..(19): 2'-deoxy-2'Fluoro
  misc_feature (20)..(20): Phosphorothioate or Phosphorodithioate 3'-Internucleotide Linkage (optionally present)
  misc_feature (1)..(19): ribonucleotide unmodified or modified as described for this sequence
ucuagcuggaagugacagutt

SEQ ID NO: 3104 - RNA, 21 nt, Artificial Sequence
  Description of Artificial Sequence: Target Sequence/siNA antisense region (stab35)
  misc_feature (4)..(5): 2'-O-methyl
  misc_feature (6)..(7): 2'-deoxy-2'Fluoro
  misc_feature (8)..(12): 2'-O-methyl
  misc_feature (13)..(13): 2'-deoxy-2'Fluoro
  misc_feature (14)..(15): 2'-O-methyl
  misc_feature (16)..(16): 2'-deoxy-2'Fluoro
  misc_feature (17)..(18): 2'-O-methyl
  misc_feature (19)..(19): 2'-deoxy-2'Fluoro
  misc_feature (20)..(21): 2'-O-methyl
ucuagcuggaagugacaguuu

SEQ ID NO: 3105 - RNA, 21 nt, Artificial Sequence
  Description of Artificial Sequence: Target Sequence/siNA antisense region (stab36)
  misc_feature (4)..(5): 2'-O-methyl
  misc_feature (6)..(7): 2'-deoxy-2'Fluoro
  misc_feature (8)..(12): 2'-O-methyl
  misc_feature (13)..(13): 2'-deoxy-2'Fluoro
  misc_feature (14)..(15): 2'-O-methyl
  misc_feature (16)..(16): 2'-deoxy-2'Fluoro
  misc_feature (17)..(18): 2'-O-methyl
  misc_feature (19)..(19): 2'-deoxy-2'Fluoro
  misc_feature (20)..(21): 2'-O-methyl
ucuagcuggaagugacagugg

SEQ ID NO: 3106 - RNA, 19 nt, Artificial Sequence
  Description of Artificial Sequence: Target Sequence/siNA sense region
accccguguccccggccuc

SEQ ID NO: 3107 - RNA, 19 nt, Artificial Sequence
  Description of Artificial Sequence: Target Sequence/siNA antisense region
gaggccggggacacggggu

SEQ ID NO: 3108 - DNA, 21 bp, Artificial Sequence
  Description of Artificial Sequence: Target Sequence/siNA sense region (stab00)
  misc_feature (1)..(19): ribonucleotide unmodified or modified as described for this sequence
accccguguccccggccuctt

SEQ ID NO: 3109 - DNA, 21 bp, Artificial Sequence
  Description of Artificial Sequence: Target Sequence/siNA antisense region (stab00as)
  misc_feature (1)..(19): ribonucleotide unmodified or modified as described for this sequence
gaggccggggacacggggutt

SEQ ID NO: 3110 - DNA, 21 bp, Artificial Sequence
  Description of Artificial Sequence: Target Sequence/siNA sense region (stab04)
  misc_feature (1)..(1): 5'-3 attached terminal deoxyabasic moiety, inverted abasic, inverted nucleotide or other terminal cap that is optionally present
  misc_feature (21)..(21): 3'-3 attached terminal deoxyabasic moiety, inverted abasic, inverted nucleotide or other terminal cap that is optionally present
  misc_feature (2)..(5): 2'-deoxy-2'Fluoro
  misc_feature (7)..(7): 2'-deoxy-2'Fluoro
  misc_feature (9)..(13): 2'-deoxy-2'Fluoro
  misc_feature (16)..(19): 2'-deoxy-2'Fluoro
  misc_feature (1)..(19): ribonucleotide unmodified or modified as described for this sequence
accccguguccccggccuctt

SEQ ID NO: 3111 - DNA, 21 bp, Artificial Sequence
  Description of Artificial Sequence: Target Sequence/siNA antisense region (stab05)
  misc_feature (5)..(6): 2'-deoxy-2'Fluoro
  misc_feature (12)..(12): 2'-deoxy-2'Fluoro
  misc_feature (14)..(14): 2'-deoxy-2'Fluoro
  misc_feature (19)..(19): 2'-deoxy-2'Fluoro
  misc_feature (20)..(20): Phosphorothioate or Phosphorodithioate 3'-Internucleotide Linkage (optionally present)
  misc_feature (1)..(19): ribonucleotide unmodified or modified as described for this sequence
gaggccggggacacggggutt

SEQ ID NO: 3112 - DNA, 21 bp, Artificial Sequence
  Description of Artificial Sequence: Target Sequence/siNA sense region (stab07)
  misc_feature (1)..(1): 5'-3 attached terminal deoxyabasic moiety, inverted abasic, inverted nucleotide or other terminal cap that is optionally present
  misc_feature (21)..(21): 3'-3 attached terminal deoxyabasic moiety, inverted abasic, inverted nucleotide or other terminal cap that is optionally present
  misc_feature (2)..(5): 2'-deoxy-2'Fluoro
  misc_feature (7)..(7): 2'-deoxy-2'Fluoro
  misc_feature (9)..(13): 2'-deoxy-2'Fluoro
  misc_feature (16)..(19): 2'-deoxy-2'Fluoro
  misc_feature (1)..(19): ribonucleotide unmodified or modified as described for this sequence
accccguguccccggccuctt

SEQ ID NO: 3113 - DNA, 21 bp, Artificial Sequence
  Description of Artificial Sequence: Target Sequence/siNA antisense region (stab08)
  misc_feature (1)..(4): 2'-O-methyl
  misc_feature (5)..(6): 2'-deoxy-2'Fluoro
  misc_feature (7)..(11): 2'-O-methyl
  misc_feature (12)..(12): 2'-deoxy-2'Fluoro
  misc_feature (13)..(13): 2'-O-methyl
  misc_feature (14)..(14): 2'-deoxy-2'Fluoro
  misc_feature (15)..(18): 2'-O-methyl
  misc_feature (19)..(19): 2'-deoxy-2'Fluoro
  misc_feature (20)..(20): Phosphorothioate or Phosphorodithioate 3'-Internucleotide Linkage (optionally present)
  misc_feature (1)..(19): ribonucleotide unmodified or modified as described for this sequence
gaggccggggacacggggutt

SEQ ID NO: 3114 - DNA, 21 bp, Artificial Sequence
  Description of Artificial Sequence: Target Sequence/siNA sense region (stab09)
  misc_feature (1)..(1): 5'-3 attached terminal deoxyabasic moiety, inverted abasic, inverted nucleotide or other terminal cap that is optionally present
  misc_feature (21)..(21): 3'-3 attached terminal deoxyabasic moiety, inverted abasic, inverted nucleotide or other terminal cap that is optionally present
  misc_feature (1)..(19): ribonucleotide unmodified or modified as described for this sequence
accccguguccccggccuctt

SEQ ID NO: 3115 - DNA, 21 bp, Artificial Sequence
  Description of Artificial Sequence: Target Sequence/siNA antisense region (stab10)
  misc_feature (20)..(20): Phosphorothioate or Phosphorodithioate 3'-Internucleotide Linkage (optionally present)
  misc_feature (1)..(19): ribonucleotide unmodified or modified as described for this sequence
gaggccggggacacggggutt

SEQ ID NO: 3116 - DNA, 21 bp, Artificial Sequence
  Description of Artificial Sequence: Target Sequence/siNA antisense region (stab19)
  misc_feature (21)..(21): 3'-3 attached terminal deoxyabasic moiety, inverted abasic, inverted nucleotide or other terminal cap that is optionally present
  misc_feature (1)..(4): 2'-O-methyl
  misc_feature (5)..(6): 2'-deoxy-2'Fluoro
  misc_feature (7)..(11): 2'-O-methyl
  misc_feature (12)..(12): 2'-deoxy-2'Fluoro
  misc_feature (13)..(13): 2'-O-methyl
  misc_feature (14)..(14): 2'-deoxy-2'Fluoro
  misc_feature (15)..(18): 2'-O-methyl
  misc_feature (19)..(19): 2'-deoxy-2'Fluoro
  misc_feature (1)..(19): ribonucleotide unmodified or modified as described for this sequence
gaggccggggacacggggutt

SEQ ID NO: 3117 - DNA, 21 bp, Artificial Sequence
  Description of Artificial Sequence: Target Sequence/siNA antisense region (stab22)
  misc_feature (21)..(21): 3'-3 attached terminal deoxyabasic moiety, inverted abasic, inverted nucleotide or other terminal cap that is optionally present
  misc_feature (20)..(20): Phosphorothioate or Phosphorodithioate 3'-Internucleotide Linkage (optionally present)
  misc_feature (1)..(19): ribonucleotide unmodified or modified as described for this sequence
gaggccggggacacggggutt

SEQ ID NO: 3118 - DNA, 21 bp, Artificial Sequence
  Description of Artificial Sequence: Target Sequence/siNA antisense region (stab25)
  misc_feature (4)..(4): 2'-O-methyl
  misc_feature (5)..(6): 2'-deoxy-2'Fluoro
  misc_feature (7)..(11): 2'-O-methyl
  misc_feature (12)..(12): 2'-deoxy-2'Fluoro
  misc_feature (13)..(13): 2'-O-methyl
  misc_feature (14)..(14): 2'-deoxy-2'Fluoro
  misc_feature (15)..(18): 2'-O-methyl
  misc_feature (19)..(19): 2'-deoxy-2'Fluoro
  misc_feature (20)..(20): Phosphorothioate or Phosphorodithioate 3'-Internucleotide Linkage (optionally present)
  misc_feature (1)..(19): ribonucleotide unmodified or modified as described for this sequence
gaggccggggacacggggutt

SEQ ID NO: 3119 - RNA, 21 nt, Artificial Sequence
  Description of Artificial Sequence: Target Sequence/siNA antisense region (stab35)
  misc_feature (4)..(4): 2'-O-methyl
  misc_feature (5)..(6): 2'-deoxy-2'Fluoro
  misc_feature (7)..(11): 2'-O-methyl
  misc_feature (12)..(12): 2'-deoxy-2'Fluoro
  misc_feature (13)..(13): 2'-O-methyl
  misc_feature (14)..(14): 2'-deoxy-2'Fluoro
  misc_feature (15)..(18): 2'-O-methyl
  misc_feature (19)..(19): 2'-deoxy-2'Fluoro
  misc_feature (20)..(21): 2'-O-methyl
gaggccggggacacgggguuu

SEQ ID NO: 3120 - RNA, 21 nt, Artificial Sequence
  Description of Artificial Sequence: Target Sequence/siNA antisense region (stab36)
  misc_feature (4)..(4): 2'-O-methyl
  misc_feature (5)..(6): 2'-deoxy-2'Fluoro
  misc_feature (7)..(11): 2'-O-methyl
  misc_feature (12)..(12): 2'-deoxy-2'Fluoro
  misc_feature (13)..(13): 2'-O-methyl
  misc_feature (14)..(14): 2'-deoxy-2'Fluoro
  misc_feature (15)..(18): 2'-O-methyl
  misc_feature (19)..(19): 2'-deoxy-2'Fluoro
  misc_feature (20)..(21): 2'-O-methyl
gaggccggggacacggggucu

SEQ ID NO: 3121 - RNA, 19 nt, Artificial Sequence
  Description of Artificial Sequence: Target Sequence/siNA sense region
cagcaccccugucucuagc

SEQ ID NO: 3122 - RNA, 19 nt, Artificial Sequence
  Description of Artificial Sequence: Target Sequence/siNA antisense region
gcuagagacaggggugcug

SEQ ID NO: 3123 - DNA, 21 bp, Artificial Sequence
  Description of Artificial Sequence: Target Sequence/siNA sense region (stab00)
  misc_feature (1)..(19): ribonucleotide unmodified or modified as described for this sequence
cagcaccccugucucuagctt

SEQ ID NO: 3124 - DNA, 21 bp, Artificial Sequence
  Description of Artificial Sequence: Target Sequence/siNA antisense region (stab00as)
  misc_feature (1)..(19): ribonucleotide unmodified or modified as described for this sequence
gcuagagacaggggugcugtt

SEQ ID NO: 3125 - DNA, 21 bp, Artificial Sequence
  Description of Artificial Sequence: Target Sequence/siNA sense region (stab04)
  misc_feature (1)..(1): 5'-3 attached terminal deoxyabasic moiety, inverted abasic, inverted nucleotide or other terminal cap that is optionally present
  misc_feature (21)..(21): 3'-3 attached terminal deoxyabasic moiety, inverted abasic, inverted nucleotide or other terminal cap that is optionally present
  misc_feature (1)..(1): 2'-deoxy-2'Fluoro
  misc_feature (4)..(4): 2'-deoxy-2'Fluoro
  misc_feature (6)..(10): 2'-deoxy-2'Fluoro
  misc_feature (12)..(16): 2'-deoxy-2'Fluoro
  misc_feature (19)..(19): 2'-deoxy-2'Fluoro
  misc_feature (1)..(19): ribonucleotide unmodified or modified as described for this sequence
cagcaccccugucucuagctt

SEQ ID NO: 3126 - DNA, 21 bp, Artificial Sequence
  Description of Artificial Sequence: Target Sequence/siNA antisense region (stab05)
  misc_feature (2)..(3): 2'-deoxy-2'Fluoro
  misc_feature (9)..(9): 2'-deoxy-2'Fluoro
  misc_feature (15)..(15): 2'-deoxy-2'Fluoro
  misc_feature (17)..(18): 2'-deoxy-2'Fluoro
  misc_feature (20)..(20): Phosphorothioate or Phosphorodithioate 3'-Internucleotide Linkage (optionally present)
  misc_feature (1)..(19): ribonucleotide unmodified or modified as described for this sequence
gcuagagacaggggugcugtt

SEQ ID NO: 3127 - DNA, 21 bp, Artificial Sequence
  Description of Artificial Sequence: Target Sequence/siNA sense region (stab07)
  misc_feature (1)..(1): 5'-3 attached terminal deoxyabasic moiety, inverted abasic, inverted nucleotide or other terminal cap that is optionally present
  misc_feature (21)..(21): 3'-3 attached terminal deoxyabasic moiety, inverted abasic, inverted nucleotide or other terminal cap that is optionally present
  misc_feature (1)..(1): 2'-deoxy-2'Fluoro
  misc_feature (4)..(4): 2'-deoxy-2'Fluoro
  misc_feature (6)..(10): 2'-deoxy-2'Fluoro
  misc_feature (12)..(16): 2'-deoxy-2'Fluoro
  misc_feature (19)..(19): 2'-deoxy-2'Fluoro
  misc_feature (1)..(19): ribonucleotide unmodified or modified as described for this sequence
cagcaccccugucucuagctt

SEQ ID NO: 3128 - DNA, 21 bp, Artificial Sequence
  Description of Artificial Sequence: Target Sequence/siNA antisense region (stab08)
  misc_feature (1)..(1): 2'-O-methyl
  misc_feature (2)..(3): 2'-deoxy-2'Fluoro
  misc_feature (4)..(8): 2'-O-methyl
  misc_feature (9)..(9): 2'-deoxy-2'Fluoro
  misc_feature (10)..(14): 2'-O-methyl
  misc_feature (15)..(15): 2'-deoxy-2'Fluoro
  misc_feature (16)..(16): 2'-O-methyl
  misc_feature (17)..(18): 2'-deoxy-2'Fluoro
  misc_feature (19)..(19): 2'-O-methyl
  misc_feature (20)..(20): Phosphorothioate or Phosphorodithioate 3'-Internucleotide Linkage (optionally present)
  misc_feature (1)..(19): ribonucleotide unmodified or modified as described for this sequence
gcuagagacaggggugcugtt

SEQ ID NO: 3129 - DNA, 21 bp, Artificial Sequence
  Description of Artificial Sequence: Target Sequence/siNA sense region (stab09)
  misc_feature (1)..(1): 5'-3 attached terminal deoxyabasic moiety, inverted abasic, inverted nucleotide or other terminal cap that is optionally present
  misc_feature (21)..(21): 3'-3 attached terminal deoxyabasic moiety, inverted abasic, inverted nucleotide or other terminal cap that is optionally present
  misc_feature (1)..(19): ribonucleotide unmodified or modified as described for this sequence
cagcaccccugucucuagctt

SEQ ID NO: 3130 - DNA, 21 bp, Artificial Sequence
  Description of Artificial Sequence: Target Sequence/siNA antisense region (stab10)
  misc_feature (20)..(20): Phosphorothioate or Phosphorodithioate 3'-Internucleotide Linkage (optionally present)
  misc_feature (1)..(19): ribonucleotide unmodified or modified as described for this sequence
gcuagagacaggggugcugtt

SEQ ID NO: 3131 - DNA, 21 bp, Artificial Sequence
  Description of Artificial Sequence: Target Sequence/siNA antisense region (stab19)
  misc_feature (21)..(21): 3'-3 attached terminal deoxyabasic moiety, inverted abasic, inverted nucleotide or other terminal cap that is optionally present
  misc_feature (1)..(1): 2'-O-methyl
  misc_feature (2)..(3): 2'-deoxy-2'Fluoro
  misc_feature (4)..(8): 2'-O-methyl
  misc_feature (9)..(9): 2'-deoxy-2'Fluoro
  misc_feature (10)..(14): 2'-O-methyl
  misc_feature (15)..(15): 2'-deoxy-2'Fluoro
  misc_feature (16)..(16): 2'-O-methyl
  misc_feature (17)..(18): 2'-deoxy-2'Fluoro
  misc_feature (19)..(19): 2'-O-methyl
  misc_feature (1)..(19): ribonucleotide unmodified or modified as described for this sequence
gcuagagacaggggugcugtt

SEQ ID NO: 3132 - DNA, 21 bp, Artificial Sequence
  Description of Artificial Sequence: Target Sequence/siNA antisense region (stab22)
  misc_feature (21)..(21): 3'-3 attached terminal deoxyabasic moiety, inverted abasic, inverted nucleotide or other terminal cap that is optionally present
  misc_feature (20)..(20): Phosphorothioate or Phosphorodithioate 3'-Internucleotide Linkage (optionally present)
  misc_feature (1)..(19): ribonucleotide unmodified or modified as described for this sequence
gcuagagacaggggugcugtt

SEQ ID NO: 3133 - DNA, 21 bp, Artificial Sequence
  Description of Artificial Sequence: Target Sequence/siNA antisense region (stab25)
  misc_feature (4)..(8): 2'-O-methyl
  misc_feature (9)..(9): 2'-deoxy-2'Fluoro
  misc_feature (10)..(14): 2'-O-methyl
  misc_feature (15)..(15): 2'-deoxy-2'Fluoro
  misc_feature (16)..(16): 2'-O-methyl
  misc_feature (17)..(18): 2'-deoxy-2'Fluoro
  misc_feature (19)..(19): 2'-O-methyl
  misc_feature (20)..(20): Phosphorothioate or Phosphorodithioate 3'-Internucleotide Linkage (optionally present)
  misc_feature (1)..(19): ribonucleotide unmodified or modified as described for this sequence
gcuagagacaggggugcugtt

SEQ ID NO: 3134 - RNA, 21 nt, Artificial Sequence
  Description of Artificial Sequence: Target Sequence/siNA antisense region (stab35)
  misc_feature (4)..(8): 2'-O-methyl
  misc_feature (9)..(9): 2'-deoxy-2'Fluoro
  misc_feature (10)..(14): 2'-O-methyl
  misc_feature (15)..(15): 2'-deoxy-2'Fluoro
  misc_feature (16)..(16): 2'-O-methyl
  misc_feature (17)..(18): 2'-deoxy-2'Fluoro
  misc_feature (19)..(21): 2'-O-methyl
gcuagagacaggggugcuguu

SEQ ID NO: 3135 - RNA, 21 nt, Artificial Sequence
  Description of Artificial Sequence: Target Sequence/siNA antisense region (stab36)
  misc_feature (4)..(8): 2'-O-methyl
  misc_feature (9)..(9): 2'-deoxy-2'Fluoro
  misc_feature (10)..(14): 2'-O-methyl
  misc_feature (15)..(15): 2'-deoxy-2'Fluoro
  misc_feature (16)..(16): 2'-O-methyl
  misc_feature (17)..(18): 2'-deoxy-2'Fluoro
  misc_feature (19)..(21): 2'-O-methyl
gcuagagacaggggugcugag

SEQ ID NO: 3136 - RNA, 19 nt, Artificial Sequence
  Description of Artificial Sequence: Target Sequence/siNA sense region
ccacuuuggucccgugcag

SEQ ID NO: 3137 - RNA, 19 nt, Artificial Sequence
  Description of Artificial Sequence: Target Sequence/siNA antisense region
cugcacgggaccaaagugg

SEQ ID NO: 3138 - DNA, 21 bp, Artificial Sequence
  Description of Artificial Sequence: Target Sequence/siNA sense region (stab00)
  misc_feature (1)..(19): ribonucleotide unmodified or modified as described for this sequence
ccacuuuggucccgugcagtt

SEQ ID NO: 3139 - DNA, 21 bp, Artificial Sequence
  Description of Artificial Sequence: Target Sequence/siNA antisense region (stab00as)
  misc_feature (1)..(19): ribonucleotide unmodified or modified as described for this sequence
cugcacgggaccaaaguggtt

SEQ ID NO: 3140 - DNA, 21 bp, Artificial Sequence
  Description of Artificial Sequence: Target Sequence/siNA sense region (stab04)
  misc_feature (1)..(1): 5'-3 attached terminal deoxyabasic moiety, inverted abasic, inverted nucleotide or other terminal cap that is optionally present
  misc_feature (21)..(21): 3'-3 attached terminal deoxyabasic moiety, inverted abasic, inverted nucleotide or other terminal cap that is optionally present
  misc_feature (1)..(2): 2'-deoxy-2'Fluoro
  misc_feature (4)..(7): 2'-deoxy-2'Fluoro
  misc_feature (10)..(13): 2'-deoxy-2'Fluoro
  misc_feature (15)..(15): 2'-deoxy-2'Fluoro
  misc_feature (17)..(17): 2'-deoxy-2'Fluoro
  misc_feature (1)..(19): ribonucleotide unmodified or modified as described for this sequence
ccacuuuggucccgugcagtt

SEQ ID NO: 3141 - DNA, 21 bp, Artificial Sequence
  Description of Artificial Sequence: Target Sequence/siNA antisense region (stab05)
  misc_feature (1)..(2): 2'-deoxy-2'Fluoro
  misc_feature (4)..(4): 2'-deoxy-2'Fluoro
  misc_feature (6)..(6): 2'-deoxy-2'Fluoro
  misc_feature (11)..(12): 2'-deoxy-2'Fluoro
  misc_feature (17)..(17): 2'-deoxy-2'Fluoro
  misc_feature (20)..(20): Phosphorothioate or Phosphorodithioate 3'-Internucleotide Linkage (optionally present)
  misc_feature (1)..(19): ribonucleotide unmodified or modified as described for this sequence
cugcacgggaccaaaguggtt

SEQ ID NO: 3142 - DNA, 21 bp, Artificial Sequence
  Description of Artificial Sequence: Target Sequence/siNA sense region (stab07)
  misc_feature (1)..(1): 5'-3 attached terminal deoxyabasic moiety, inverted abasic, inverted nucleotide or other terminal cap that is optionally present
  misc_feature (21)..(21): 3'-3 attached terminal deoxyabasic moiety, inverted abasic, inverted nucleotide or other terminal cap that is optionally present
  misc_feature (1)..(2): 2'-deoxy-2'Fluoro
  misc_feature (4)..(7): 2'-deoxy-2'Fluoro
  misc_feature (10)..(13): 2'-deoxy-2'Fluoro
  misc_feature (15)..(15): 2'-deoxy-2'Fluoro
  misc_feature (17)..(17): 2'-deoxy-2'Fluoro
  misc_feature (1)..(19): ribonucleotide unmodified or modified as described for this sequence
ccacuuuggucccgugcagtt

SEQ ID NO: 3143 - DNA, 21 bp, Artificial Sequence
  Description of Artificial Sequence: Target Sequence/siNA antisense region (stab08)
  misc_feature (1)..(2): 2'-deoxy-2'Fluoro
  misc_feature (3)..(3): 2'-O-methyl
  misc_feature (4)..(4): 2'-deoxy-2'Fluoro
  misc_feature (5)..(5): 2'-O-methyl
  misc_feature (6)..(6): 2'-deoxy-2'Fluoro
  misc_feature (7)..(10): 2'-O-methyl
  misc_feature (11)..(12): 2'-deoxy-2'Fluoro
  misc_feature (13)..(16): 2'-O-methyl
  misc_feature (17)..(17): 2'-deoxy-2'Fluoro
  misc_feature (18)..(19): 2'-O-methyl
  misc_feature (20)..(20): Phosphorothioate or Phosphorodithioate 3'-Internucleotide Linkage (optionally present)
  misc_feature (1)..(19): ribonucleotide unmodified or modified as described for this sequence
cugcacgggaccaaaguggtt

SEQ ID NO: 3144 - DNA, 21 bp, Artificial Sequence
  Description of Artificial Sequence: Target Sequence/siNA sense region (stab09)
  misc_feature (1)..(1): 5'-3 attached terminal deoxyabasic moiety, inverted abasic, inverted nucleotide or other terminal cap that is optionally present
  misc_feature (21)..(21): 3'-3 attached terminal deoxyabasic moiety, inverted abasic, inverted nucleotide or other terminal cap that is optionally present
  misc_feature (1)..(19): ribonucleotide unmodified or modified as described for this sequence
ccacuuuggucccgugcagtt

SEQ ID NO: 3145 - DNA, 21 bp, Artificial Sequence
  Description of Artificial Sequence: Target Sequence/siNA antisense region (stab10)
  misc_feature (20)..(20): Phosphorothioate or Phosphorodithioate 3'-Internucleotide Linkage (optionally present)
  misc_feature (1). .(19): ribonucleotide unmodified or modified as described for this sequence
cugcacgggaccaaaguggtt

SEQ ID NO: 3146 - DNA, 21 bp, Artificial Sequence
  Description of Artificial Sequence: Target Sequence/siNA antisense region (stab19)
  misc_feature (21)..(21): 3'-3 attached terminal deoxyabasic moiety, inverted abasic, inverted nucleotide or other terminal cap that is optionally present
  misc_feature (1)..(2): 2'-deoxy-2'Fluoro
  misc_feature (3)..(3): 2'-O-methyl
  misc_feature (4)..(4): 2'-deoxy-2'Fluoro
  misc_feature (5)..(5): 2'-O-methyl
  misc_feature (6)..(6): 2'-deoxy-2'Fluoro
  misc_feature (7)..(10): 2'-O-methyl
  misc_feature (11)..(12): 2'-deoxy-2'Fluoro
  misc_feature (13)..(16): 2'-O-methyl
  misc_feature (17)..(17): 2'-deoxy-2'Fluoro
  misc_feature (18)..(19): 2'-O-methyl
  misc_feature (1). .(19): ribonucleotide unmodified or modified as described for this sequence
cugcacgggaccaaaguggtt

SEQ ID NO: 3147 - DNA, 21 bp, Artificial Sequence
  Description of Artificial Sequence: Target Sequence/siNA antisense region (stab22)
  misc_feature (21)..(21): 3'-3 attached terminal deoxyabasic moiety, inverted abasic, inverted nucleotide or other terminal cap that is optionally present
  misc_feature (20)..(20): Phosphorothioate or Phosphorodithioate 3'-Internucleotide Linkage (optionally present)
  misc_feature (1). .(19): ribonucleotide unmodified or modified as described for this sequence
cugcacgggaccaaaguggtt

SEQ ID NO: 3148 - DNA, 21 bp, Artificial Sequence
  Description of Artificial Sequence: Target Sequence/siNA antisense region (stab25)
  misc_feature (4)..(4): 2'-deoxy-2'Fluoro
  misc_feature (5)..(5): 2'-O-methyl
  misc_feature (6)..(6): 2'-deoxy-2'Fluoro
  misc_feature (7)..(10): 2'-O-methyl
  misc_feature (11)..(12): 2'-deoxy-2'Fluoro
  misc_feature (13)..(16): 2'-O-methyl
  misc_feature (17)..(17): 2'-deoxy-2'Fluoro
  misc_feature (18)..(19): 2'-O-methyl
  misc_feature (20)..(20): Phosphorothioate or Phosphorodithioate 3'-Internucleotide Linkage (optionally present)
  misc_feature (1)..(19): ribonucleotide unmodified or modified as described for this sequence
cugcacgggaccaaaguggtt

SEQ ID NO: 3149 - RNA, 21 nt, Artificial Sequence
  Description of Artificial Sequence: Target Sequence/siNA antisense region (stab35)
  misc_feature (4)..(4): 2'-deoxy-2'Fluoro
  misc_feature (5)..(5): 2'-O-methyl
  misc_feature (6)..(6): 2'-deoxy-2'Fluoro
  misc_feature (7)..(10): 2'-O-methyl
  misc_feature (11)..(12): 2'-deoxy-2'Fluoro
  misc_feature (13)..(16): 2'-O-methyl
  misc_feature (17)..(17): 2'-deoxy-2'Fluoro
  misc_feature (18)..(21): 2'-O-methyl
cugcacgggaccaaagugguu

SEQ ID NO: 3150 - RNA, 21 nt, Artificial Sequence
  Description of Artificial Sequence: Target Sequence/siNA antisense region (stab36)
  misc_feature (4)..(4): 2'-deoxy-2'Fluoro
  misc_feature (5)..(5): 2'-O-methyl
  misc_feature (6)..(6): 2'-deoxy-2'Fluoro
  misc_feature (7)..(10): 2'-O-methyl
  misc_feature (11)..(12): 2'-deoxy-2'Fluoro
  misc_feature (13)..(16): 2'-O-methyl
  misc_feature (17)..(17): 2'-deoxy-2'Fluoro
  misc_feature (18)..(21): 2'-O-methyl
cugcacgggaccaaaguggcu

SEQ ID NO: 3151 - RNA, 19 nt, Artificial Sequence
  Description of Artificial Sequence: Target Sequence/siNA sense region
gcuucuguccugcgucgaa

SEQ ID NO: 3152 - RNA, 19 nt, Artificial Sequence
  Description of Artificial Sequence: Target Sequence/siNA antisense region
uucgacgcaggacagaagc

SEQ ID NO: 3153 - DNA, 21 bp, Artificial Sequence
  Description of Artificial Sequence: Target Sequence/siNA sense region (stab00)
  misc_feature (1). .(19): ribonucleotide unmodified or modified as described for this sequence
gcuucuguccugcgucgaatt

SEQ ID NO: 3154 - DNA, 21 bp, Artificial Sequence
  Description of Artificial Sequence: Target Sequence/siNA antisense region (stab00as)
  misc_feature (1). .(19): ribonucleotide unmodified or modified as described for this sequence
uucgacgcaggacagaagctt

SEQ ID NO: 3155 - DNA, 21 bp, Artificial Sequence
  Description of Artificial Sequence: Target Sequence/siNA sense region (stab04)
  misc_feature (1)..(1): 5'-3 attached terminal deoxyabasic moiety, inverted abasic, inverted nucleotide or other terminal cap that is optionally present
  misc_feature (21)..(21): 3'-3 attached terminal deoxyabasic moiety, inverted abasic, inverted nucleotide or other terminal cap that is optionally present
  misc_feature (2)..(6): 2'-deoxy-2'Fluoro
  misc_feature (8)..(11): 2'-deoxy-2'Fluoro
  misc_feature (13)..(13): 2'-deoxy-2'Fluoro
  misc_feature (15)..(16): 2'-deoxy-2'Fluoro
  misc_feature (1)..(19): ribonucleotide unmodified or modified as described for this sequence
gcuucuguccugcgucgaatt

SEQ ID NO: 3156 - DNA, 21 bp, Artificial Sequence
  Description of Artificial Sequence: Target Sequence/siNA antisense region (stab05)
  misc_feature (1)..(3): 2'-deoxy-2'Fluoro
  misc_feature (6)..(6): 2'-deoxy-2'Fluoro
  misc_feature (8)..(8): 2'-deoxy-2'Fluoro
  misc_feature (13)..(13): 2'-deoxy-2'Fluoro
  misc_feature (19)..(19): 2'-deoxy-2'Fluoro
  misc_feature (20)..(20): Phosphorothioate or Phosphorodithioate 3'-Internucleotide Linkage (optionally present)
  misc_feature (1)..(19): ribonucleotide unmodified or modified as described for this sequence
uucgacgcaggacagaagctt

SEQ ID NO: 3157 - DNA, 21 bp, Artificial Sequence
  Description of Artificial Sequence: Target Sequence/siNA sense region (stab07)
  misc_feature (1)..(1): 5'-3 attached terminal deoxyabasic moiety, inverted abasic, inverted nucleotide or other terminal cap that is optionally present
  misc_feature (21)..(21): 3'-3 attached terminal deoxyabasic moiety, inverted abasic, inverted nucleotide or other terminal cap that is optionally present
  misc_feature (2)..(6): 2'-deoxy-2'Fluoro
  misc_feature (8)..(11): 2'-deoxy-2'Fluoro
  misc_feature (13)..(13): 2'-deoxy-2'Fluoro
  misc_feature (15)..(16): 2'-deoxy-2'Fluoro
  misc_feature (1). .(19): ribonucleotide unmodified or modified as described for this sequence
gcuucuguccugcgucgaatt

SEQ ID NO: 3158 - DNA, 21 bp, Artificial Sequence
  Description of Artificial Sequence: Target Sequence/siNA antisense region (stab08)
  misc_feature (1)..(3): 2'-deoxy-2'Fluoro
  misc_feature (4)..(5): 2'-O-methyl
  misc_feature (6)..(6): 2'-deoxy-2'Fluoro
  misc_feature (7)..(7): 2'-O-methyl
  misc_feature (8)..(8): 2'-deoxy-2'Fluoro
  misc_feature (9)..(12): 2'-O-methyl
  misc_feature (13)..(13): 2'-deoxy-2'Fluoro
  misc_feature (14)..(18): 2'-O-methyl
  misc_feature (19)..(19): 2'-deoxy-2'Fluoro
  misc_feature (20)..(20): Phosphorothioate or Phosphorodithioate 3'-Internucleotide Linkage (optionally present)
  misc_feature (1). .(19): ribonucleotide unmodified or modified as described for this sequence
uucgacgcaggacagaagctt

SEQ ID NO: 3159 - DNA, 21 bp, Artificial Sequence
  Description of Artificial Sequence: Target Sequence/siNA sense region (stab09)
  misc_feature (1)..(1): 5'-3 attached terminal deoxyabasic moiety, inverted abasic, inverted nucleotide or other terminal cap that is optionally present
  misc_feature (21)..(21): 3'-3 attached terminal deoxyabasic moiety, inverted abasic, inverted nucleotide or other terminal cap that is optionally present
  misc_feature (1). .(19): ribonucleotide unmodified or modified as described for this sequence
gcuucuguccugcgucgaatt

SEQ ID NO: 3160 - DNA, 21 bp, Artificial Sequence
  Description of Artificial Sequence: Target Sequence/siNA antisense region (stab10)
  misc_feature (20)..(20): Phosphorothioate or Phosphorodithioate 3'-Internucleotide Linkage (optionally present)
  misc_feature (1). .(19): ribonucleotide unmodified or modified as described for this sequence
uucgacgcaggacagaagctt

SEQ ID NO: 3161 - DNA, 21 bp, Artificial Sequence
  Description of Artificial Sequence: Target Sequence/siNA antisense region (stab19)
  misc_feature (21)..(21): 3'-3 attached terminal deoxyabasic moiety, inverted abasic, inverted nucleotide or other terminal cap that is optionally present
  misc_feature (1)..(3): 2'-deoxy-2'Fluoro
  misc_feature (4)..(5): 2'-O-methyl
  misc_feature (6)..(6): 2'-deoxy-2'Fluoro
  misc_feature (7)..(7): 2'-O-methyl
  misc_feature (8)..(8): 2'-deoxy-2'Fluoro
  misc_feature (9)..(12): 2'-O-methyl
  misc_feature (13)..(13): 2'-deoxy-2'Fluoro
  misc_feature (14)..(18): 2'-O-methyl
  misc_feature (19)..(19): 2'-deoxy-2'Fluoro
  misc_feature (1). .(19): ribonucleotide unmodified or modified as described for this sequence
uucgacgcaggacagaagctt

SEQ ID NO: 3162 - DNA, 21 bp, Artificial Sequence
  Description of Artificial Sequence: Target Sequence/siNA antisense region (stab22)
  misc_feature (21)..(21): 3'-3 attached terminal deoxyabasic moiety, inverted abasic, inverted nucleotide or other terminal cap that is optionally present
  misc_feature (20)..(20): Phosphorothioate or Phosphorodithioate 3'-Internucleotide Linkage (optionally present)
  misc_feature (1). .(19): ribonucleotide unmodified or modified as described for this sequence
uucgacgcaggacagaagctt

SEQ ID NO: 3163 - DNA, 21 bp, Artificial Sequence
  Description of Artificial Sequence: Target Sequence/siNA antisense region (stab25)
  misc_feature (4)..(5): 2'-O-methyl
  misc_feature (6)..(6): 2'-deoxy-2'Fluoro
  misc_feature (7)..(7): 2'-O-methyl
  misc_feature (8)..(8): 2'-deoxy-2'Fluoro
  misc_feature (9)..(12): 2'-O-methyl
  misc_feature (13)..(13): 2'-deoxy-2'Fluoro
  misc_feature (14)..(18): 2'-O-methyl
  misc_feature (19)..(19): 2'-deoxy-2'Fluoro
  misc_feature (20)..(20): Phosphorothioate or Phosphorodithioate 3'-Internucleotide Linkage (optionally present)
  misc_feature (1)..(19): ribonucleotide unmodified or modified as described for this sequence
uucgacgcaggacagaagctt

SEQ ID NO: 3164 - RNA, 21 nt, Artificial Sequence
  Description of Artificial Sequence: Target Sequence/siNA antisense region (stab35)
  misc_feature (4)..(5): 2'-O-methyl
  misc_feature (6)..(6): 2'-deoxy-2'Fluoro
  misc_feature (7)..(7): 2'-O-methyl
  misc_feature (8)..(8): 2'-deoxy-2'Fluoro
  misc_feature (9)..(12): 2'-O-methyl
  misc_feature (13)..(13): 2'-deoxy-2'Fluoro
  misc_feature (14)..(18): 2'-O-methyl
  misc_feature (19)..(19): 2'-deoxy-2'Fluoro
  misc_feature (20)..(21): 2'-O-methyl
uucgacgcaggacagaagcuu

SEQ ID NO: 3165 - RNA, 21 nt, Artificial Sequence
  Description of Artificial Sequence: Target Sequence/siNA antisense region (stab36)
  misc_feature (4)..(5): 2'-O-methyl
  misc_feature (6)..(6): 2'-deoxy-2'Fluoro
  misc_feature (7)..(7): 2'-O-methyl
  misc_feature (8)..(8): 2'-deoxy-2'Fluoro
  misc_feature (9)..(12): 2'-O-methyl
  misc_feature (13)..(13): 2'-deoxy-2'Fluoro
  misc_feature (14)..(18): 2'-O-methyl
  misc_feature (19)..(19): 2'-deoxy-2'Fluoro
  misc_feature (20)..(21): 2'-O-methyl
uucgacgcaggacagaagcug

SEQ ID NO: 3166 - RNA, 19 nt, Artificial Sequence
  Description of Artificial Sequence: Target Sequence/siNA sense region
agcuuugaaggccgaaggc

SEQ ID NO: 3167 - RNA, 19 nt, Artificial Sequence
  Description of Artificial Sequence: Target Sequence/siNA antisense region
gccuucggccuucaaagcu

SEQ ID NO: 3168 - DNA, 21 bp, Artificial Sequence
  Description of Artificial Sequence: Target Sequence/siNA sense region (stab00)
  misc_feature (1). .(19): ribonucleotide unmodified or modified as described for this sequence
agcuuugaaggccgaaggctt

SEQ ID NO: 3169 - DNA, 21 bp, Artificial Sequence
  Description of Artificial Sequence: Target Sequence/siNA antisense region (stab00as)
  misc_feature (1). .(19): ribonucleotide unmodified or modified as described for this sequence
gccuucggccuucaaagcutt

SEQ ID NO: 3170 - DNA, 21 bp, Artificial Sequence
  Description of Artificial Sequence: Target Sequence/siNA sense region (stab04)
  misc_feature (1)..(1): 5'-3 attached terminal deoxyabasic moiety, inverted abasic, inverted nucleotide or other terminal cap that is optionally present
  misc_feature (21)..(21): 3'-3 attached terminal deoxyabasic moiety, inverted abasic, inverted nucleotide or other terminal cap that is optionally present
  misc_feature (3)..(6): 2'-deoxy-2'Fluoro
  misc_feature (12)..(13): 2'-deoxy-2'Fluoro
  misc_feature (19)..(19): 2'-deoxy-2'Fluoro
  misc_feature (1). .(19): ribonucleotide unmodified or modified as described for this sequence
agcuuugaaggccgaaggctt

SEQ ID NO: 3171 - DNA, 21 bp, Artificial Sequence
  Description of Artificial Sequence: Target Sequence/siNA antisense region (stab05)
  misc_feature (2)..(6): 2'-deoxy-2'Fluoro
  misc_feature (9)..(13): 2'-deoxy-2'Fluoro
  misc_feature (18)..(19): 2'-deoxy-2'Fluoro
  misc_feature (20)..(20): Phosphorothioate or Phosphorodithioate 3'-Internucleotide Linkage (optionally present)
  misc_feature (1). .(19): ribonucleotide unmodified or modified as described for this sequence
gccuucggccuucaaagcutt

SEQ ID NO: 3172 - DNA, 21 bp, Artificial Sequence
  Description of Artificial Sequence: Target Sequence/siNA sense region (stab07)
  misc_feature (1)..(1): 5'-3 attached terminal deoxyabasic moiety, inverted abasic, inverted nucleotide or other terminal cap that is optionally present
  misc_feature (21)..(21): 3'-3 attached terminal deoxyabasic moiety, inverted abasic, inverted nucleotide or other terminal cap that is optionally present
  misc_feature (3)..(6): 2'-deoxy-2'Fluoro
  misc_feature (12)..(13): 2'-deoxy-2'Fluoro
  misc_feature (19)..(19): 2'-deoxy-2'Fluoro
  misc_feature (1). .(19): ribonucleotide unmodified or modified as described for this sequence
agcuuugaaggccgaaggctt

SEQ ID NO: 3173 - DNA, 21 bp, Artificial Sequence
  Description of Artificial Sequence: Target Sequence/siNA antisense region (stab08)
  misc_feature (1)..(1): 2'-O-methyl
  misc_feature (2)..(6): 2'-deoxy-2'Fluoro
  misc_feature (7)..(8): 2'-O-methyl
  misc_feature (9)..(13): 2'-deoxy-2'Fluoro
  misc_feature (14)..(17): 2'-O-methyl
  misc_feature (18)..(19): 2'-deoxy-2'Fluoro
  misc_feature (20)..(20): Phosphorothioate or Phosphorodithioate 3'-Internucleotide Linkage (optionally present)
  misc_feature (1). .(19): ribonucleotide unmodified or modified as described for this sequence
gccuucggccuucaaagcutt

SEQ ID NO: 3174 - DNA, 21 bp, Artificial Sequence
  Description of Artificial Sequence: Target Sequence/siNA sense region (stab09)
  misc_feature (1)..(1): 5'-3 attached terminal deoxyabasic moiety, inverted abasic, inverted nucleotide or other terminal cap that is optionally present
  misc_feature (21)..(21): 3'-3 attached terminal deoxyabasic moiety, inverted abasic, inverted nucleotide or other terminal cap that is optionally present
  misc_feature (1). .(19): ribonucleotide unmodified or modified as described for this sequence
agcuuugaaggccgaaggctt

SEQ ID NO: 3175 - DNA, 21 bp, Artificial Sequence
  Description of Artificial Sequence: Target Sequence/siNA antisense region (stab10)
  misc_feature (20)..(20): Phosphorothioate or Phosphorodithioate 3'-Internucleotide Linkage (optionally present)
  misc_feature (1). .(19): ribonucleotide unmodified or modified as described for this sequence
gccuucggccuucaaagcutt

SEQ ID NO: 3176 - DNA, 21 bp, Artificial Sequence
  Description of Artificial Sequence: Target Sequence/siNA antisense region (stab19)
  misc_feature (21)..(21): 3'-3 attached terminal deoxyabasic moiety, inverted abasic, inverted nucleotide or other terminal cap that is optionally present
  misc_feature (1)..(1): 2'-O-methyl
  misc_feature (2)..(6): 2'-deoxy-2'Fluoro
  misc_feature (7)..(8): 2'-O-methyl
  misc_feature (9)..(13): 2'-deoxy-2'Fluoro
  misc_feature (14)..(17): 2'-O-methyl
  misc_feature (18)..(19): 2'-deoxy-2'Fluoro
  misc_feature (1). .(19): ribonucleotide unmodified or modified as described for this sequence
gccuucggccuucaaagcutt

SEQ ID NO: 3177 - DNA, 21 bp, Artificial Sequence
  Description of Artificial Sequence: Target Sequence/siNA antisense region (stab22)
  misc_feature (21)..(21): 3'-3 attached terminal deoxyabasic moiety, inverted abasic, inverted nucleotide or other terminal cap that is optionally present
  misc_feature (20)..(20): Phosphorothioate or Phosphorodithioate 3'-Internucleotide Linkage (optionally present)
  misc_feature (1). .(19): ribonucleotide unmodified or modified as described for this sequence
gccuucggccuucaaagcutt

SEQ ID NO: 3178 - DNA, 21 bp, Artificial Sequence
  Description of Artificial Sequence: Target Sequence/siNA antisense region (stab25)
  misc_feature (4)..(6): 2'-deoxy-2'Fluoro
  misc_feature (7)..(8): 2'-O-methyl
  misc_feature (9)..(13): 2'-deoxy-2'Fluoro
  misc_feature (14)..(17): 2'-O-methyl
  misc_feature (18)..(19): 2'-deoxy-2'Fluoro
  misc_feature (20)..(20): Phosphorothioate or Phosphorodithioate 3'-Internucleotide Linkage (optionally present)
  misc_feature (1)..(19): ribonucleotide unmodified or modified as described for this sequence
gccuucggccuucaaagcutt

SEQ ID NO: 3179 - RNA, 21 nt, Artificial Sequence
  Description of Artificial Sequence: Target Sequence/siNA antisense region (stab35)
  misc_feature (4)..(6): 2'-deoxy-2'Fluoro
  misc_feature (7)..(8): 2'-O-methyl
  misc_feature (9)..(13): 2'-deoxy-2'Fluoro
  misc_feature (14)..(17): 2'-O-methyl
  misc_feature (18)..(19): 2'-deoxy-2'Fluoro
  misc_feature (20)..(21): 2'-O-methyl
gccuucggccuucaaagcuuu

SEQ ID NO: 3180 - RNA, 21 nt, Artificial Sequence
  Description of Artificial Sequence: Target Sequence/siNA antisense region (stab36)
  misc_feature (4)..(6): 2'-deoxy-2'Fluoro
  misc_feature (7)..(8): 2'-O-methyl
  misc_feature (9)..(13): 2'-deoxy-2'Fluoro
  misc_feature (14)..(17): 2'-O-methyl
  misc_feature (18)..(19): 2'-deoxy-2'Fluoro
  misc_feature (20)..(21): 2'-O-methyl
gccuucggccuucaaagcuuc

SEQ ID NO: 3181 - RNA, 19 nt, Artificial Sequence
  Description of Artificial Sequence: Target Sequence/siNA sense region
cagugcaagagacucuggc

SEQ ID NO: 3182 - RNA, 19 nt, Artificial Sequence
  Description of Artificial Sequence: Target Sequence/siNA antisense region
gccagagucucuugcacug

SEQ ID NO: 3183 - DNA, 21 bp, Artificial Sequence
  Description of Artificial Sequence: Target Sequence/siNA sense region (stab00)
  misc_feature (1). .(19): ribonucleotide unmodified or modified as described for this sequence
cagugcaagagacucuggctt

SEQ ID NO: 3184 - DNA, 21 bp, Artificial Sequence
  Description of Artificial Sequence: Target Sequence/siNA antisense region (stab00as)
  misc_feature (1). .(19): ribonucleotide unmodified or modified as described for this sequence
gccagagucucuugcacugtt

SEQ ID NO: 3185 - DNA, 21 bp, Artificial Sequence
  Description of Artificial Sequence: Target Sequence/siNA sense region (stab04)
  misc_feature (1)..(1): 5'-3 attached terminal deoxyabasic moiety, inverted abasic, inverted nucleotide or other terminal cap that is optionally present
  misc_feature (21)..(21): 3'-3 attached terminal deoxyabasic moiety, inverted abasic, inverted nucleotide or other terminal cap that is optionally present
  misc_feature (1)..(1): 2'-deoxy-2'Fluoro
  misc_feature (4)..(4): 2'-deoxy-2'Fluoro
  misc_feature (6)..(6): 2'-deoxy-2'Fluoro
  misc_feature (13)..(16): 2'-deoxy-2'Fluoro
  misc_feature (19)..(19): 2'-deoxy-2'Fluoro
  misc_feature (1)..(19): ribonucleotide unmodified or modified as described for this sequence
cagugcaagagacucuggctt

SEQ ID NO: 3186 - DNA, 21 bp, Artificial Sequence
  Description of Artificial Sequence: Target Sequence/siNA antisense region (stab05)
  misc_feature (2)..(3): 2'-deoxy-2'Fluoro
  misc_feature (8)..(13): 2'-deoxy-2'Fluoro
  misc_feature (15)..(15): 2'-deoxy-2'Fluoro
  misc_feature (17)..(18): 2'-deoxy-2'Fluoro
  misc_feature (20)..(20): Phosphorothioate or Phosphorodithioate 3'-Internucleotide Linkage (optionally present)
  misc_feature (1)..(19): ribonucleotide unmodified or modified as described for this sequence
gccagagucucuugcacugtt

SEQ ID NO: 3187 - DNA, 21 bp, Artificial Sequence
  Description of Artificial Sequence: Target Sequence/siNA sense region (stab07)
  misc_feature (1)..(1): 5'-3 attached terminal deoxyabasic moiety, inverted abasic, inverted nucleotide or other terminal cap that is optionally present
  misc_feature (21)..(21): 3'-3 attached terminal deoxyabasic moiety, inverted abasic, inverted nucleotide or other terminal cap that is optionally present
  misc_feature (1)..(1): 2'-deoxy-2'Fluoro
  misc_feature (4)..(4): 2'-deoxy-2'Fluoro
  misc_feature (6)..(6): 2'-deoxy-2'Fluoro
  misc_feature (13)..(16): 2'-deoxy-2'Fluoro
  misc_feature (19)..(19): 2'-deoxy-2'Fluoro
  misc_feature (1). .(19): ribonucleotide unmodified or modified as described for this sequence
cagugcaagagacucuggctt

SEQ ID NO: 3188 - DNA, 21 bp, Artificial Sequence
  Description of Artificial Sequence: Target Sequence/siNA antisense region (stab08)
  misc_feature (1)..(1): 2'-O-methyl
  misc_feature (2)..(3): 2'-deoxy-2'Fluoro
  misc_feature (4)..(7): 2'-O-methyl
  misc_feature (8)..(13): 2'-deoxy-2'Fluoro
  misc_feature (14)..(14): 2'-O-methyl
  misc_feature (15)..(15): 2'-deoxy-2'Fluoro
  misc_feature (16)..(16): 2'-O-methyl
  misc_feature (17)..(18): 2'-deoxy-2'Fluoro
  misc_feature (19)..(19): 2'-O-methyl
  misc_feature (20)..(20): Phosphorothioate or Phosphorodithioate 3'-Internucleotide Linkage (optionally present)
  misc_feature (1). .(19): ribonucleotide unmodified or modified as described for this sequence
gccagagucucuugcacugtt

SEQ ID NO: 3189 - DNA, 21 bp, Artificial Sequence
  Description of Artificial Sequence: Target Sequence/siNA sense region (stab09)
  misc_feature (1)..(1): 5'-3 attached terminal deoxyabasic moiety, inverted abasic, inverted nucleotide or other terminal cap that is optionally present
  misc_feature (21)..(21): 3'-3 attached terminal deoxyabasic moiety, inverted abasic, inverted nucleotide or other terminal cap that is optionally present
  misc_feature (1). .(19): ribonucleotide unmodified or modified as described for this sequence
cagugcaagagacucuggctt

SEQ ID NO: 3190 - DNA, 21 bp, Artificial Sequence
  Description of Artificial Sequence: Target Sequence/siNA antisense region (stab10)
  misc_feature (20)..(20): Phosphorothioate or Phosphorodithioate 3'-Internucleotide Linkage (optionally present)
  misc_feature (1). .(19): ribonucleotide unmodified or modified as described for this sequence
gccagagucucuugcacugtt

SEQ ID NO: 3191 - DNA, 21 bp, Artificial Sequence
  Description of Artificial Sequence: Target Sequence/siNA antisense region (stab19)
  misc_feature (21)..(21): 3'-3 attached terminal deoxyabasic moiety, inverted abasic, inverted nucleotide or other terminal cap that is optionally present
  misc_feature (1)..(1): 2'-O-methyl
  misc_feature (2)..(3): 2'-deoxy-2'Fluoro
  misc_feature (4)..(7): 2'-O-methyl
  misc_feature (8)..(13): 2'-deoxy-2'Fluoro
  misc_feature (14)..(14): 2'-O-methyl
  misc_feature (15)..(15): 2'-deoxy-2'Fluoro
  misc_feature (16)..(16): 2'-O-methyl
  misc_feature (17)..(18): 2'-deoxy-2'Fluoro
  misc_feature (19)..(19): 2'-O-methyl
  misc_feature (1). .(19): ribonucleotide unmodified or modified as described for this sequence
gccagagucucuugcacugtt

SEQ ID NO: 3192 - DNA, 21 bp, Artificial Sequence
  Description of Artificial Sequence: Target Sequence/siNA antisense region (stab22)
  misc_feature (21)..(21): 3'-3 attached terminal deoxyabasic moiety, inverted abasic, inverted nucleotide or other terminal cap that is optionally present
  misc_feature (20)..(20): Phosphorothioate or Phosphorodithioate 3'-Internucleotide Linkage (optionally present)
  misc_feature (1). .(19): ribonucleotide unmodified or modified as described for this sequence
gccagagucucuugcacugtt

SEQ ID NO: 3193 - DNA, 21 bp, Artificial Sequence
  Description of Artificial Sequence: Target Sequence/siNA antisense region (stab25)
  misc_feature (4)..(7): 2'-O-methyl
  misc_feature (8)..(13): 2'-deoxy-2'Fluoro
  misc_feature (14)..(14): 2'-O-methyl
  misc_feature (15)..(15): 2'-deoxy-2'Fluoro
  misc_feature (16)..(16): 2'-O-methyl
  misc_feature (17)..(18): 2'-deoxy-2'Fluoro
  misc_feature (19)..(19): 2'-O-methyl
  misc_feature (20)..(20): Phosphorothioate or Phosphorodithioate 3'-Internucleotide Linkage (optionally present)
  misc_feature (1)..(19): ribonucleotide unmodified or modified as described for this sequence
gccagagucucuugcacugtt

SEQ ID NO: 3194 - RNA, 21 nt, Artificial Sequence
  Description of Artificial Sequence: Target Sequence/siNA antisense region (stab35)
  misc_feature (4)..(7): 2'-O-methyl
  misc_feature (8)..(13): 2'-deoxy-2'Fluoro
  misc_feature (14)..(14): 2'-O-methyl
  misc_feature (15)..(15): 2'-deoxy-2'Fluoro
  misc_feature (16)..(16): 2'-O-methyl
  misc_feature (17)..(18): 2'-deoxy-2'Fluoro
  misc_feature (19)..(21): 2'-O-methyl
gccagagucucuugcacuguu

SEQ ID NO: 3195 - RNA, 21 nt, Artificial Sequence
  Description of Artificial Sequence: Target Sequence/siNA antisense region (stab36)
  misc_feature (4)..(7): 2'-O-methyl
  misc_feature (8)..(13): 2'-deoxy-2'Fluoro
  misc_feature (14)..(14): 2'-O-methyl
  misc_feature (15)..(15): 2'-deoxy-2'Fluoro
  misc_feature (16)..(16): 2'-O-methyl
  misc_feature (17)..(18): 2'-deoxy-2'Fluoro
  misc_feature (19)..(21): 2'-O-methyl
gccagagucucuugcacugcc

SEQ ID NO: 3196 - RNA, 19 nt, Artificial Sequence
  Description of Artificial Sequence: Target Sequence/siNA sense region
ccuccacaguucgaccugc

SEQ ID NO: 3197 - RNA, 19 nt, Artificial Sequence
  Description of Artificial Sequence: Target Sequence/siNA antisense region
gcaggucgaacuguggagg

SEQ ID NO: 3198 - DNA, 21 bp, Artificial Sequence
  Description of Artificial Sequence: Target Sequence/siNA sense region (stab00)
  misc_feature (1). .(19): ribonucleotide unmodified or modified as described for this sequence
ccuccacaguucgaccugctt

SEQ ID NO: 3199 - DNA, 21 bp, Artificial Sequence
  Description of Artificial Sequence: Target Sequence/siNA antisense region (stab00as)
  misc_feature (1). .(19): ribonucleotide unmodified or modified as described for this sequence
gcaggucgaacuguggaggtt

SEQ ID NO: 3200 - DNA, 21 bp, Artificial Sequence
  Description of Artificial Sequence: Target Sequence/siNA sense region (stab04)
  misc_feature (1)..(1): 5'-3 attached terminal deoxyabasic moiety, inverted abasic, inverted nucleotide or other terminal cap that is optionally present
  misc_feature (21)..(21): 3'-3 attached terminal deoxyabasic moiety, inverted abasic, inverted nucleotide or other terminal cap that is optionally present
  misc_feature (1)..(5): 2'-deoxy-2'Fluoro
  misc_feature (7)..(7): 2'-deoxy-2'Fluoro
  misc_feature (10)..(12): 2'-deoxy-2'Fluoro
  misc_feature (15)..(17): 2'-deoxy-2'Fluoro
  misc_feature (19)..(19): 2'-deoxy-2'Fluoro
  misc_feature (1)..(19): ribonucleotide unmodified or modified as described for this sequence
ccuccacaguucgaccugctt

SEQ ID NO: 3201 - DNA, 21 bp, Artificial Sequence
  Description of Artificial Sequence: Target Sequence/siNA antisense region (stab05)
  misc_feature (2)..(2): 2'-deoxy-2'Fluoro
  misc_feature (6)..(7): 2'-deoxy-2'Fluoro
  misc_feature (11)..(12): 2'-deoxy-2'Fluoro
  misc_feature (14)..(14): 2'-deoxy-2'Fluoro
  misc_feature (20)..(20): Phosphorothioate or Phosphorodithioate 3'-Internucleotide Linkage (optionally present)
  misc_feature (1)..(19): ribonucleotide unmodified or modified as described for this sequence
gcaggucgaacuguggaggtt

SEQ ID NO: 3202 - DNA, 21 bp, Artificial Sequence
  Description of Artificial Sequence: Target Sequence/siNA sense region (stab07)
  misc_feature (1)..(1): 5'-3 attached terminal deoxyabasic moiety, inverted abasic, inverted nucleotide or other terminal cap that is optionally present
  misc_feature (21)..(21): 3'-3 attached terminal deoxyabasic moiety, inverted abasic, inverted nucleotide or other terminal cap that is optionally present
  misc_feature (1)..(5): 2'-deoxy-2'Fluoro
  misc_feature (7)..(7): 2'-deoxy-2'Fluoro
  misc_feature (10)..(12): 2'-deoxy-2'Fluoro
  misc_feature (15)..(17): 2'-deoxy-2'Fluoro
  misc_feature (19)..(19): 2'-deoxy-2'Fluoro
  misc_feature (1). .(19): ribonucleotide unmodified or modified as described for this sequence
ccuccacaguucgaccugctt

SEQ ID NO: 3203 - DNA, 21 bp, Artificial Sequence
  Description of Artificial Sequence: Target Sequence/siNA antisense region (stab08)
  misc_feature (1)..(1): 2'-O-methyl
  misc_feature (2)..(2): 2'-deoxy-2'Fluoro
  misc_feature (3)..(5): 2'-O-methyl
  misc_feature (6)..(7): 2'-deoxy-2'Fluoro
  misc_feature (8)..(10): 2'-O-methyl
  misc_feature (11)..(12): 2'-deoxy-2'Fluoro
  misc_feature (13)..(13): 2'-O-methyl
  misc_feature (14)..(14): 2'-deoxy-2'Fluoro
  misc_feature (15)..(19): 2'-O-methyl
  misc_feature (20)..(20): Phosphorothioate or Phosphorodithioate 3'-Internucleotide Linkage (optionally present)
  misc_feature (1). .(19): ribonucleotide unmodified or modified as described for this sequence
gcaggucgaacuguggaggtt

SEQ ID NO: 3204 - DNA, 21 bp, Artificial Sequence
  Description of Artificial Sequence: Target Sequence/siNA sense region (stab09)
  misc_feature (1)..(1): 5'-3 attached terminal deoxyabasic moiety, inverted abasic, inverted nucleotide or other terminal cap that is optionally present
  misc_feature (21)..(21): 3'-3 attached terminal deoxyabasic moiety, inverted abasic, inverted nucleotide or other terminal cap that is optionally present
  misc_feature (1). .(19): ribonucleotide unmodified or modified as described for this sequence
ccuccacaguucgaccugctt

SEQ ID NO: 3205 - DNA, 21 bp, Artificial Sequence
  Description of Artificial Sequence: Target Sequence/siNA antisense region (stab10)
  misc_feature (20)..(20): Phosphorothioate or Phosphorodithioate 3'-Internucleotide Linkage (optionally present)
  misc_feature (1). .(19): ribonucleotide unmodified or modified as described for this sequence
gcaggucgaacuguggaggtt

SEQ ID NO: 3206 - DNA, 21 bp, Artificial Sequence
  Description of Artificial Sequence: Target Sequence/siNA antisense region (stab19)
  misc_feature (21)..(21): 3'-3 attached terminal deoxyabasic moiety, inverted abasic, inverted nucleotide or other terminal cap that is optionally present
  misc_feature (1)..(1): 2'-O-methyl
  misc_feature (2)..(2): 2'-deoxy-2'Fluoro
  misc_feature (3)..(5): 2'-O-methyl
  misc_feature (6)..(7): 2'-deoxy-2'Fluoro
  misc_feature (8)..(10): 2'-O-methyl
  misc_feature (11)..(12): 2'-deoxy-2'Fluoro
  misc_feature (13)..(13): 2'-O-methyl
  misc_feature (14)..(14): 2'-deoxy-2'Fluoro
  misc_feature (15)..(19): 2'-O-methyl
  misc_feature (1). .(19): ribonucleotide unmodified or modified as described for this sequence
gcaggucgaacuguggaggtt

SEQ ID NO: 3207 - DNA, 21 bp, Artificial Sequence
  Description of Artificial Sequence: Target Sequence/siNA antisense region (stab22)
  misc_feature (21)..(21): 3'-3 attached terminal deoxyabasic moiety, inverted abasic, inverted nucleotide or other terminal cap that is optionally present
  misc_feature (20)..(20): Phosphorothioate or Phosphorodithioate 3'-Internucleotide Linkage (optionally present)
  misc_feature (1). .(19): ribonucleotide unmodified or modified as described for this sequence
gcaggucgaacuguggaggtt

SEQ ID NO: 3208 - DNA, 21 bp, Artificial Sequence
  Description of Artificial Sequence: Target Sequence/siNA antisense region (stab25)
  misc_feature (4)..(5): 2'-O-methyl
  misc_feature (6)..(7): 2'-deoxy-2'Fluoro
  misc_feature (8)..(10): 2'-O-methyl
  misc_feature (11)..(12): 2'-deoxy-2'Fluoro
  misc_feature (13)..(13): 2'-O-methyl
  misc_feature (14)..(14): 2'-deoxy-2'Fluoro
  misc_feature (15)..(19): 2'-O-methyl
  misc_feature (20)..(20): Phosphorothioate or Phosphorodithioate 3'-Internucleotide Linkage (optionally present)
  misc_feature (1)..(19): ribonucleotide unmodified or modified as described for this sequence
gcaggucgaacuguggaggtt

SEQ ID NO: 3209 - RNA, 21 nt, Artificial Sequence
  Description of Artificial Sequence: Target Sequence/siNA antisense region (stab35)
  misc_feature (4)..(5): 2'-O-methyl
  misc_feature (6)..(7): 2'-deoxy-2'Fluoro
  misc_feature (8)..(10): 2'-O-methyl
  misc_feature (11)..(12): 2'-deoxy-2'Fluoro
  misc_feature (13)..(13): 2'-O-methyl
  misc_feature (14)..(14): 2'-deoxy-2'Fluoro
  misc_feature (15)..(21): 2'-O-methyl
gcaggucgaacuguggagguu

SEQ ID NO: 3210 - RNA, 21 nt, Artificial Sequence
  Description of Artificial Sequence: Target Sequence/siNA antisense region (stab36)
  misc_feature (4)..(5): 2'-O-methyl
  misc_feature (6)..(7): 2'-deoxy-2'Fluoro
  misc_feature (8)..(10): 2'-O-methyl
  misc_feature (11)..(12): 2'-deoxy-2'Fluoro
  misc_feature (13)..(13): 2'-O-methyl
  misc_feature (14)..(14): 2'-deoxy-2'Fluoro
  misc_feature (15)..(21): 2'-O-methyl
gcaggucgaacuguggaggcc

SEQ ID NO: 3211 - RNA, 19 nt, Artificial Sequence
  Description of Artificial Sequence: Target Sequence/siNA sense region
cggcugcugugugccuucg

SEQ ID NO: 3212 - RNA, 19 nt, Artificial Sequence
  Description of Artificial Sequence: Target Sequence/siNA antisense region
cgaaggcacacagcagccg

SEQ ID NO: 3213 - DNA, 21 bp, Artificial Sequence
  Description of Artificial Sequence: Target Sequence/siNA sense region (stab00)
  misc_feature (1). .(19): ribonucleotide unmodified or modified as described for this sequence
cggcugcugugugccuucgtt

SEQ ID NO: 3214 - DNA, 21 bp, Artificial Sequence
  Description of Artificial Sequence: Target Sequence/siNA antisense region (stab00as)
  misc_feature (1). .(19): ribonucleotide unmodified or modified as described for this sequence
cgaaggcacacagcagccgtt

SEQ ID NO: 3215 - DNA, 21 bp, Artificial Sequence
  Description of Artificial Sequence: Target Sequence/siNA sense region (stab04)
  misc_feature (1)..(1): 5'-3 attached terminal deoxyabasic moiety, inverted abasic, inverted nucleotide or other terminal cap that is optionally present
  misc_feature (21)..(21): 3'-3 attached terminal deoxyabasic moiety, inverted abasic, inverted nucleotide or other terminal cap that is optionally present
  misc_feature (1)..(1): 2'-deoxy-2'Fluoro
  misc_feature (4)..(5): 2'-deoxy-2'Fluoro
  misc_feature (7)..(8): 2'-deoxy-2'Fluoro
  misc_feature (10)..(10): 2'-deoxy-2'Fluoro
  misc_feature (12)..(12): 2'-deoxy-2'Fluoro
  misc_feature (14)..(18): 2'-deoxy-2'Fluoro
  misc_feature (1)..(19): ribonucleotide unmodified or modified as described for this sequence
cggcugcugugugccuucgtt

SEQ ID NO: 3216 - DNA, 21 bp, Artificial Sequence
  Description of Artificial Sequence: Target Sequence/siNA antisense region (stab05)
  misc_feature (1)..(1): 2'-deoxy-2'Fluoro
  misc_feature (7)..(7): 2'-deoxy-2'Fluoro
  misc_feature (9)..(9): 2'-deoxy-2'Fluoro
  misc_feature (11)..(11): 2'-deoxy-2'Fluoro
  misc_feature (14)..(14): 2'-deoxy-2'Fluoro
  misc_feature (17)..(18): 2'-deoxy-2'Fluoro
  misc_feature (20)..(20): Phosphorothioate or Phosphorodithioate 3'-Internucleotide Linkage (optionally present)
  misc_feature (1)..(19): ribonucleotide unmodified or modified as described for this sequence
cgaaggcacacagcagccgtt

SEQ ID NO: 3217 - DNA, 21 bp, Artificial Sequence
  Description of Artificial Sequence: Target Sequence/siNA sense region (stab07)
  misc_feature (1)..(1): 5'-3 attached terminal deoxyabasic moiety, inverted abasic, inverted nucleotide or other terminal cap that is optionally present
  misc_feature (21)..(21): 3'-3 attached terminal deoxyabasic moiety, inverted abasic, inverted nucleotide or other terminal cap that is optionally present
  misc_feature (1)..(1): 2'-deoxy-2'Fluoro
  misc_feature (4)..(5): 2'-deoxy-2'Fluoro
  misc_feature (7)..(8): 2'-deoxy-2'Fluoro
  misc_feature (10)..(10): 2'-deoxy-2'Fluoro
  misc_feature (12)..(12): 2'-deoxy-2'Fluoro
  misc_feature (14)..(18): 2'-deoxy-2'Fluoro
  misc_feature (1). .(19): ribonucleotide unmodified or modified as described for this sequence
cggcugcugugugccuucgtt

SEQ ID NO: 3218 - DNA, 21 bp, Artificial Sequence
  Description of Artificial Sequence: Target Sequence/siNA antisense region (stab08)
  misc_feature (1)..(1): 2'-deoxy-2'Fluoro
  misc_feature (2)..(6): 2'-O-methyl
  misc_feature (7)..(7): 2'-deoxy-2'Fluoro
  misc_feature (8)..(8): 2'-O-methyl
  misc_feature (9)..(9): 2'-deoxy-2'Fluoro
  misc_feature (10)..(10): 2'-O-methyl
  misc_feature (11)..(11): 2'-deoxy-2'Fluoro
  misc_feature (12)..(13): 2'-O-methyl
  misc_feature (14)..(14): 2'-deoxy-2'Fluoro
  misc_feature (15)..(16): 2'-O-methyl
  misc_feature (17)..(18): 2'-deoxy-2'Fluoro
  misc_feature (19)..(19): 2'-O-methyl
  misc_feature (20)..(20): Phosphorothioate or Phosphorodithioate 3'-Internucleotide Linkage (optionally present)
  misc_feature (1). .(19): ribonucleotide unmodified or modified as described for this sequence
cgaaggcacacagcagccgtt

SEQ ID NO: 3219 - DNA, 21 bp, Artificial Sequence
  Description of Artificial Sequence: Target Sequence/siNA sense region (stab09)
  misc_feature (1)..(1): 5'-3 attached terminal deoxyabasic moiety, inverted abasic, inverted nucleotide or other terminal cap that is optionally present
  misc_feature (21)..(21): 3'-3 attached terminal deoxyabasic moiety, inverted abasic, inverted nucleotide or other terminal cap that is optionally present
  misc_feature (1). .(19): ribonucleotide unmodified or modified as described for this sequence
cggcugcugugugccuucgtt

SEQ ID NO: 3220 - DNA, 21 bp, Artificial Sequence
  Description of Artificial Sequence: Target Sequence/siNA antisense region (stab10)
  misc_feature (20)..(20): Phosphorothioate or Phosphorodithioate 3'-Internucleotide Linkage (optionally present)
  misc_feature (1). .(19): ribonucleotide unmodified or modified as described for this sequence
cgaaggcacacagcagccgtt

SEQ ID NO: 3221 - DNA, 21 bp, Artificial Sequence
  Description of Artificial Sequence: Target Sequence/siNA antisense region (stab19)
  misc_feature (21)..(21): 3'-3 attached terminal deoxyabasic moiety, inverted abasic, inverted nucleotide or other terminal cap that is optionally present
  misc_feature (1)..(1): 2'-deoxy-2'Fluoro
  misc_feature (2)..(6): 2'-O-methyl
  misc_feature (7)..(7): 2'-deoxy-2'Fluoro
  misc_feature (8)..(8): 2'-O-methyl
  misc_feature (9)..(9): 2'-deoxy-2'Fluoro
  misc_feature (10)..(10): 2'-O-methyl
  misc_feature (11)..(11): 2'-deoxy-2'Fluoro
  misc_feature (12)..(13): 2'-O-methyl
  misc_feature (14)..(14): 2'-deoxy-2'Fluoro
  misc_feature (15)..(16): 2'-O-methyl
  misc_feature (17)..(18): 2'-deoxy-2'Fluoro
  misc_feature (19)..(19): 2'-O-methyl
  misc_feature (1). .(19): ribonucleotide unmodified or modified as described for this sequence
cgaaggcacacagcagccgtt

SEQ ID NO: 3222 - DNA, 21 bp, Artificial Sequence
  Description of Artificial Sequence: Target Sequence/siNA antisense region (stab22)
  misc_feature (21)..(21): 3'-3 attached terminal deoxyabasic moiety, inverted abasic, inverted nucleotide or other terminal cap that is optionally present
  misc_feature (20)..(20): Phosphorothioate or Phosphorodithioate 3'-Internucleotide Linkage (optionally present)
  misc_feature (1). .(19): ribonucleotide unmodified or modified as described for this sequence
cgaaggcacacagcagccgtt

SEQ ID NO: 3223 - DNA, 21 bp, Artificial Sequence
  Description of Artificial Sequence: Target Sequence/siNA antisense region (stab25)
  misc_feature (4)..(6): 2'-O-methyl
  misc_feature (7)..(7): 2'-deoxy-2'Fluoro
  misc_feature (8)..(8): 2'-O-methyl
  misc_feature (9)..(9): 2'-deoxy-2'Fluoro
  misc_feature (10)..(10): 2'-O-methyl
  misc_feature (11)..(11): 2'-deoxy-2'Fluoro
  misc_feature (12)..(13): 2'-O-methyl
  misc_feature (14)..(14): 2'-deoxy-2'Fluoro
  misc_feature (15)..(16): 2'-O-methyl
  misc_feature (17)..(18): 2'-deoxy-2'Fluoro
  misc_feature (19)..(19): 2'-O-methyl
  misc_feature (20)..(20): Phosphorothioate or Phosphorodithioate 3'-Internucleotide Linkage (optionally present)
  misc_feature (1)..(19): ribonucleotide unmodified or modified as described for this sequence
cgaaggcacacagcagccgtt

SEQ ID NO: 3224 - RNA, 21 nt, Artificial Sequence
  Description of Artificial Sequence: Target Sequence/siNA antisense region (stab35)
  misc_feature (4)..(6): 2'-O-methyl
  misc_feature (7)..(7): 2'-deoxy-2'Fluoro
  misc_feature (8)..(8): 2'-O-methyl
  misc_feature (9)..(9): 2'-deoxy-2'Fluoro
  misc_feature (10)..(10): 2'-O-methyl
  misc_feature (11)..(11): 2'-deoxy-2'Fluoro
  misc_feature (12)..(13): 2'-O-methyl
  misc_feature (14)..(14): 2'-deoxy-2'Fluoro
  misc_feature (15)..(16): 2'-O-methyl
  misc_feature (17)..(18): 2'-deoxy-2'Fluoro
  misc_feature (19)..(21): 2'-O-methyl
cgaaggcacacagcagccguu

SEQ ID NO: 3225 - RNA, 21 nt, Artificial Sequence
  Description of Artificial Sequence: Target Sequence/siNA antisense region (stab36)
  misc_feature (4)..(6): 2'-O-methyl
  misc_feature (7)..(7): 2'-deoxy-2'Fluoro
  misc_feature (8)..(8): 2'-O-methyl
  misc_feature (9)..(9): 2'-deoxy-2'Fluoro
  misc_feature (10)..(10): 2'-O-methyl
  misc_feature (11)..(11): 2'-deoxy-2'Fluoro
  misc_feature (12)..(13): 2'-O-methyl
  misc_feature (14)..(14): 2'-deoxy-2'Fluoro
  misc_feature (15)..(16): 2'-O-methyl
  misc_feature (17)..(18): 2'-deoxy-2'Fluoro
  misc_feature (19)..(21): 2'-O-methyl
cgaaggcacacagcagccgca

SEQ ID NO: 3226 - RNA, 19 nt, Artificial Sequence
  Description of Artificial Sequence: Target Sequence/siNA sense region
gcgguggaaggcccgaggg

SEQ ID NO: 3227 - RNA, 19 nt, Artificial Sequence
  Description of Artificial Sequence: Target Sequence/siNA antisense region
cccucgggccuuccaccgc

SEQ ID NO: 3228 - DNA, 21 bp, Artificial Sequence
  Description of Artificial Sequence: Target Sequence/siNA sense region (stab00)
  misc_feature (1). .(19): ribonucleotide unmodified or modified as described for this sequence
gcgguggaaggcccgagggtt

SEQ ID NO: 3229 - DNA, 21 bp, Artificial Sequence
  Description of Artificial Sequence: Target Sequence/siNA antisense region (stab00as)
  misc_feature (1). .(19): ribonucleotide unmodified or modified as described for this sequence
cccucgggccuuccaccgctt

SEQ ID NO: 3230 - DNA, 21 bp, Artificial Sequence
  Description of Artificial Sequence: Target Sequence/siNA sense region (stab04)
  misc_feature (1)..(1): 5'-3 attached terminal deoxyabasic moiety, inverted abasic, inverted nucleotide or other terminal cap that is optionally present
  misc_feature (21)..(21): 3'-3 attached terminal deoxyabasic moiety, inverted abasic, inverted nucleotide or other terminal cap that is optionally present
  misc_feature (2)..(2): 2'-deoxy-2'Fluoro
  misc_feature (5)..(5): 2'-deoxy-2'Fluoro
  misc_feature (12)..(14): 2'-deoxy-2'Fluoro
  misc_feature (1)..(19): ribonucleotide unmodified or modified as described for this sequence
gcgguggaaggcccgagggtt

SEQ ID NO: 3231 - DNA, 21 bp, Artificial Sequence
  Description of Artificial Sequence: Target Sequence/siNA antisense region (stab05)
  misc_feature (1)..(5): 2'-deoxy-2'Fluoro
  misc_feature (9)..(14): 2'-deoxy-2'Fluoro
  misc_feature (16)..(17): 2'-deoxy-2'Fluoro
  misc_feature (19)..(19): 2'-deoxy-2'Fluoro
  misc_feature (20)..(20): Phosphorothioate or Phosphorodithioate 3'-Internucleotide Linkage (optionally present)
  misc_feature (1)..(19): ribonucleotide unmodified or modified as described for this sequence
cccucgggccuuccaccgctt

SEQ ID NO: 3232 - DNA, 21 bp, Artificial Sequence
  Description of Artificial Sequence: Target Sequence/siNA sense region (stab07)
  misc_feature (1)..(1): 5'-3 attached terminal deoxyabasic moiety, inverted abasic, inverted nucleotide or other terminal cap that is optionally present
  misc_feature (21)..(21): 3'-3 attached terminal deoxyabasic moiety, inverted abasic, inverted nucleotide or other terminal cap that is optionally present
  misc_feature (2)..(2): 2'-deoxy-2'Fluoro
  misc_feature (5)..(5): 2'-deoxy-2'Fluoro
  misc_feature (12)..(14): 2'-deoxy-2'Fluoro
  misc_feature (1). .(19): ribonucleotide unmodified or modified as described for this sequence
gcgguggaaggcccgagggtt

SEQ ID NO: 3233 - DNA, 21 bp, Artificial Sequence
  Description of Artificial Sequence: Target Sequence/siNA antisense region (stab08)
  misc_feature (1)..(5): 2'-deoxy-2'Fluoro
  misc_feature (6)..(8): 2'-O-methyl
  misc_feature (9)..(14): 2'-deoxy-2'Fluoro
  misc_feature (15)..(15): 2'-O-methyl
  misc_feature (16)..(17): 2'-deoxy-2'Fluoro
  misc_feature (18)..(18): 2'-O-methyl
  misc_feature (19)..(19): 2'-deoxy-2'Fluoro
  misc_feature (20)..(20): Phosphorothioate or Phosphorodithioate 3'-Internucleotide Linkage (optionally present)
  misc_feature (1). .(19): ribonucleotide unmodified or modified as described for this sequence
cccucgggccuuccaccgctt

SEQ ID NO: 3234 - DNA, 21 bp, Artificial Sequence
  Description of Artificial Sequence: Target Sequence/siNA sense region (stab09)
  misc_feature (1)..(1): 5'-3 attached terminal deoxyabasic moiety, inverted abasic, inverted nucleotide or other terminal cap that is optionally present
  misc_feature (21)..(21): 3'-3 attached terminal deoxyabasic moiety, inverted abasic, inverted nucleotide or other terminal cap that is optionally present
  misc_feature (1). .(19): ribonucleotide unmodified or modified as described for this sequence
gcgguggaaggcccgagggtt

SEQ ID NO: 3235 - DNA, 21 bp, Artificial Sequence
  Description of Artificial Sequence: Target Sequence/siNA antisense region (stab10)
  misc_feature (20)..(20): Phosphorothioate or Phosphorodithioate 3'-Internucleotide Linkage (optionally present)
  misc_feature (1). .(19): ribonucleotide unmodified or modified as described for this sequence
cccucgggccuuccaccgctt

SEQ ID NO: 3236 - DNA, 21 bp, Artificial Sequence
  Description of Artificial Sequence: Target Sequence/siNA antisense region (stab19)
  misc_feature (21)..(21): 3'-3 attached terminal deoxyabasic moiety, inverted abasic, inverted nucleotide or other terminal cap that is optionally present
  misc_feature (1)..(5): 2'-deoxy-2'Fluoro
  misc_feature (6)..(8): 2'-O-methyl
  misc_feature (9)..(14): 2'-deoxy-2'Fluoro
  misc_feature (15)..(15): 2'-O-methyl
  misc_feature (16)..(17): 2'-deoxy-2'Fluoro
  misc_feature (18)..(18): 2'-O-methyl
  misc_feature (19)..(19): 2'-deoxy-2'Fluoro
cccucgggccuuccaccgctt

SEQ ID NO: 3237 - DNA, 21 bp, Artificial Sequence
  Description of Artificial Sequence: Target Sequence/siNA antisense region (stab22)
  misc_feature (21)..(21): 3'-3 attached terminal deoxyabasic moiety, inverted abasic, inverted nucleotide or other terminal cap that is optionally present
  misc_feature (20)..(20): Phosphorothioate or Phosphorodithioate 3'-Internucleotide Linkage (optionally present)
  misc_feature (1). .(19): ribonucleotide unmodified or modified as described for this sequence
cccucgggccuuccaccgctt

SEQ ID NO: 3238 - DNA, 21 bp, Artificial Sequence
  Description of Artificial Sequence: Target Sequence/siNA antisense region (stab25)
  misc_feature (4)..(5): 2'-deoxy-2'Fluoro
  misc_feature (6)..(8): 2'-O-methyl
  misc_feature (9)..(14): 2'-deoxy-2'Fluoro
  misc_feature (15)..(15): 2'-O-methyl
  misc_feature (16)..(17): 2'-deoxy-2'Fluoro
  misc_feature (18)..(18): 2'-O-methyl
  misc_feature (19)..(19): 2'-deoxy-2'Fluoro
  misc_feature (20)..(20): Phosphorothioate or Phosphorodithioate 3'-Internucleotide Linkage (optionally present)
  misc_feature (1)..(19): ribonucleotide unmodified or modified as described for this sequence
cccucgggccuuccaccgctt

SEQ ID NO: 3239 - RNA, 21 nt, Artificial Sequence
  Description of Artificial Sequence: Target Sequence/siNA antisense region (stab35)
  misc_feature (4)..(5): 2'-deoxy-2'Fluoro
  misc_feature (6)..(8): 2'-O-methyl
  misc_feature (9)..(14): 2'-deoxy-2'Fluoro
  misc_feature (15)..(15): 2'-O-methyl
  misc_feature (16)..(17): 2'-deoxy-2'Fluoro
  misc_feature (18)..(18): 2'-O-methyl
  misc_feature (19)..(19): 2'-deoxy-2'Fluoro
  misc_feature (20)..(21): 2'-O-methyl
cccucgggccuuccaccgcuu

SEQ ID NO: 3240 - RNA, 21 nt, Artificial Sequence
  Description of Artificial Sequence: Target Sequence/siNA antisense region (stab36)
  misc_feature (4)..(5): 2'-deoxy-2'Fluoro
  misc_feature (6)..(8): 2'-O-methyl
  misc_feature (9)..(14): 2'-deoxy-2'Fluoro
  misc_feature (15)..(15): 2'-O-methyl
  misc_feature (16)..(17): 2'-deoxy-2'Fluoro
  misc_feature (18)..(18): 2'-O-methyl
  misc_feature (19)..(19): 2'-deoxy-2'Fluoro
  misc_feature (20)..(21): 2'-O-methyl
cccucgggccuuccaccgcga

SEQ ID NO: 3241 - RNA, 19 nt, Artificial Sequence
  Description of Artificial Sequence: Target Sequence/siNA sense region
ggcgcgaucuugacccuaa

SEQ ID NO: 3242 - RNA, 19 nt, Artificial Sequence
  Description of Artificial Sequence: Target Sequence/siNA antisense region
uuagggucaagaucgcgcc

SEQ ID NO: 3243 - DNA, 21 bp, Artificial Sequence
  Description of Artificial Sequence: Target Sequence/siNA sense region (stab00)
  misc_feature (1). .(19): ribonucleotide unmodified or modified as described for this sequence
ggcgcgaucuugacccuaatt

SEQ ID NO: 3244 - DNA, 21 bp, Artificial Sequence
  Description of Artificial Sequence: Target Sequence/siNA antisense region (stab00as)
  misc_feature (1). .(19): ribonucleotide unmodified or modified as described for this sequence
uuagggucaagaucgcgcctt

SEQ ID NO: 3245 - DNA, 21 bp, Artificial Sequence
  Description of Artificial Sequence: Target Sequence/siNA sense region (stab04)
  misc_feature (1)..(1): 5'-3 attached terminal deoxyabasic moiety, inverted abasic, inverted nucleotide or other terminal cap that is optionally present
  misc_feature (21)..(21): 3'-3 attached terminal deoxyabasic moiety, inverted abasic, inverted nucleotide or other terminal cap that is optionally present
  misc_feature (3)..(3): 2'-deoxy-2'Fluoro
  misc_feature (5)..(5): 2'-deoxy-2'Fluoro
  misc_feature (8)..(11): 2'-deoxy-2'Fluoro
  misc_feature (14)..(17): 2'-deoxy-2'Fluoro
  misc_feature (1)..(19): ribonucleotide unmodified or modified as described for this sequence
ggcgcgaucuugacccuaatt

SEQ ID NO: 3246 - DNA, 21 bp, Artificial Sequence
  Description of Artificial Sequence: Target Sequence/siNA antisense region (stab05)
  misc_feature (1)..(2): 2'-deoxy-2'Fluoro
  misc_feature (7)..(8): 2'-deoxy-2'Fluoro
  misc_feature (13)..(14): 2'-deoxy-2'Fluoro
  misc_feature (16)..(16): 2'-deoxy-2'Fluoro
  misc_feature (18)..(19): 2'-deoxy-2'Fluoro
  misc_feature (20)..(20): Phosphorothioate or Phosphorodithioate 3'-Internucleotide Linkage (optionally present)
  misc_feature (1)..(19): ribonucleotide unmodified or modified as described for this sequence
uuagggucaagaucgcgcctt

SEQ ID NO: 3247 - DNA, 21 bp, Artificial Sequence
  Description of Artificial Sequence: Target Sequence/siNA sense region (stab07)
  misc_feature (1)..(1): 5'-3 attached terminal deoxyabasic moiety, inverted abasic, inverted nucleotide or other terminal cap that is optionally present
  misc_feature (21)..(21): 3'-3 attached terminal deoxyabasic moiety, inverted abasic, inverted nucleotide or other terminal cap that is optionally present
  misc_feature (3)..(3): 2'-deoxy-2'Fluoro
  misc_feature (5)..(5): 2'-deoxy-2'Fluoro
  misc_feature (8)..(11): 2'-deoxy-2'Fluoro
  misc_feature (14)..(17): 2'-deoxy-2'Fluoro
  misc_feature (1). .(19): ribonucleotide unmodified or modified as described for this sequence
ggcgcgaucuugacccuaatt

SEQ ID NO: 3248 - DNA, 21 bp, Artificial Sequence
  Description of Artificial Sequence: Target Sequence/siNA antisense region (stab08)
  misc_feature (1)..(2): 2'-deoxy-2'Fluoro
  misc_feature (3)..(6): 2'-O-methyl
  misc_feature (7)..(8): 2'-deoxy-2'Fluoro
  misc_feature (9)..(12): 2'-O-methyl
  misc_feature (13)..(14): 2'-deoxy-2'Fluoro
  misc_feature (15)..(15): 2'-O-methyl
  misc_feature (16)..(16): 2'-deoxy-2'Fluoro
  misc_feature (17)..(17): 2'-O-methyl
  misc_feature (18)..(19): 2'-deoxy-2'Fluoro
  misc_feature (20)..(20): Phosphorothioate or Phosphorodithioate 3'-Internucleotide Linkage (optionally present)
  misc_feature (1). .(19): ribonucleotide unmodified or modified as described for this sequence
uuagggucaagaucgcgcctt

SEQ ID NO: 3249 - DNA, 21 bp, Artificial Sequence
  Description of Artificial Sequence: Target Sequence/siNA sense region (stab09)
  misc_feature (1)..(1): 5'-3 attached terminal deoxyabasic moiety, inverted abasic, inverted nucleotide or other terminal cap that is optionally present
  misc_feature (21)..(21): 3'-3 attached terminal deoxyabasic moiety, inverted abasic, inverted nucleotide or other terminal cap that is optionally present
  misc_feature (1). .(19): ribonucleotide unmodified or modified as described for this sequence
ggcgcgaucuugacccuaatt

SEQ ID NO: 3250 - DNA, 21 bp, Artificial Sequence
  Description of Artificial Sequence: Target Sequence/siNA antisense region (stab10)
  misc_feature (20)..(20): Phosphorothioate or Phosphorodithioate 3'-Internucleotide Linkage (optionally present)
  misc_feature (1). .(19): ribonucleotide unmodified or modified as described for this sequence
uuagggucaagaucgcgcctt

SEQ ID NO: 3251 - DNA, 21 bp, Artificial Sequence
  Description of Artificial Sequence: Target Sequence/siNA antisense region (stab19)
  misc_feature (21)..(21): 3'-3 attached terminal deoxyabasic moiety, inverted abasic, inverted nucleotide or other terminal cap that is optionally present
  misc_feature (1)..(2): 2'-deoxy-2'Fluoro
  misc_feature (3)..(6): 2'-O-methyl
  misc_feature (7)..(8): 2'-deoxy-2'Fluoro
  misc_feature (9)..(12): 2'-O-methyl
  misc_feature (13)..(14): 2'-deoxy-2'Fluoro
  misc_feature (15)..(15): 2'-O-methyl
  misc_feature (16)..(16): 2'-deoxy-2'Fluoro
  misc_feature (17)..(17): 2'-O-methyl
  misc_feature (18)..(19): 2'-deoxy-2'Fluoro
  misc_feature (1). .(19): ribonucleotide unmodified or modified as described for this sequence
uuagggucaagaucgcgcctt

SEQ ID NO: 3252 - DNA, 21 bp, Artificial Sequence
  Description of Artificial Sequence: Target Sequence/siNA antisense region (stab22)
  misc_feature (21)..(21): 3'-3 attached terminal deoxyabasic moiety, inverted abasic, inverted nucleotide or other terminal cap that is optionally present
  misc_feature (20)..(20): Phosphorothioate or Phosphorodithioate 3'-Internucleotide Linkage (optionally present)
  misc_feature (1). .(19): ribonucleotide unmodified or modified as described for this sequence
uuagggucaagaucgcgcctt

SEQ ID NO: 3253 - DNA, 21 bp, Artificial Sequence
  Description of Artificial Sequence: Target Sequence/siNA antisense region (stab25)
  misc_feature (4)..(6): 2'-O-methyl
  misc_feature (7)..(8): 2'-deoxy-2'Fluoro
  misc_feature (9)..(12): 2'-O-methyl
  misc_feature (13)..(14): 2'-deoxy-2'Fluoro
  misc_feature (15)..(15): 2'-O-methyl
  misc_feature (16)..(16): 2'-deoxy-2'Fluoro
  misc_feature (17)..(17): 2'-O-methyl
  misc_feature (18)..(19): 2'-deoxy-2'Fluoro
  misc_feature (20)..(20): Phosphorothioate or Phosphorodithioate 3'-Internucleotide Linkage (optionally present)
  misc_feature (1)..(19): ribonucleotide unmodified or modified as described for this sequence
uuagggucaagaucgcgcctt

SEQ ID NO: 3254 - RNA, 21 nt, Artificial Sequence
  Description of Artificial Sequence: Target Sequence/siNA antisense region (stab35)
  misc_feature (4)..(6): 2'-O-methyl
  misc_feature (7)..(8): 2'-deoxy-2'Fluoro
  misc_feature (9)..(12): 2'-O-methyl
  misc_feature (13)..(14): 2'-deoxy-2'Fluoro
  misc_feature (15)..(15): 2'-O-methyl
  misc_feature (16)..(16): 2'-deoxy-2'Fluoro
  misc_feature (17)..(17): 2'-O-methyl
  misc_feature (18)..(19): 2'-deoxy-2'Fluoro
  misc_feature (20)..(21): 2'-O-methyl
uuagggucaagaucgcgccuu

SEQ ID NO: 3255 - RNA, 21 nt, Artificial Sequence
  Description of Artificial Sequence: Target Sequence/siNA antisense region (stab36)
  misc_feature (4)..(6): 2'-O-methyl
  misc_feature (7)..(8): 2'-deoxy-2'Fluoro
  misc_feature (9)..(12): 2'-O-methyl
  misc_feature (13)..(14): 2'-deoxy-2'Fluoro
  misc_feature (15)..(15): 2'-O-methyl
  misc_feature (16)..(16): 2'-deoxy-2'Fluoro
  misc_feature (17)..(17): 2'-O-methyl
  misc_feature (18)..(19): 2'-deoxy-2'Fluoro
  misc_feature (20)..(21): 2'-O-methyl
uuagggucaagaucgcgcccc

SEQ ID NO: 3256 - RNA, 19 nt, Artificial Sequence
  Description of Artificial Sequence: Target Sequence/siNA sense region
agaccggcggccaugaugg

SEQ ID NO: 3257 - RNA, 19 nt, Artificial Sequence
  Description of Artificial Sequence: Target Sequence/siNA antisense region
ccaucauggccgccggucu

SEQ ID NO: 3258 - DNA, 21 bp, Artificial Sequence
  Description of Artificial Sequence: Target Sequence/siNA sense region (stab00)
  misc_feature (1). .(19): ribonucleotide unmodified or modified as described for this sequence
agaccggcggccaugauggtt

SEQ ID NO: 3259 - DNA, 21 bp, Artificial Sequence
  Description of Artificial Sequence: Target Sequence/siNA antisense region (stab00as)
  misc_feature (1). .(19): ribonucleotide unmodified or modified as described for this sequence
ccaucauggccgccggucutt

SEQ ID NO: 3260 - DNA, 21 bp, Artificial Sequence
  Description of Artificial Sequence: Target Sequence/siNA sense region (stab04)
  misc_feature (1)..(1): 5'-3 attached terminal deoxyabasic moiety, inverted abasic, inverted nucleotide or other terminal cap that is optionally present
  misc_feature (21)..(21): 3'-3 attached terminal deoxyabasic moiety, inverted abasic, inverted nucleotide or other terminal cap that is optionally present
  misc_feature (4)..(5): 2'-deoxy-2'Fluoro
  misc_feature (8)..(8): 2'-deoxy-2'Fluoro
  misc_feature (11)..(12): 2'-deoxy-2'Fluoro
  misc_feature (14)..(14): 2'-deoxy-2'Fluoro
  misc_feature (17)..(17): 2'-deoxy-2'Fluoro
  misc_feature (1)..(19): ribonucleotide unmodified or modified as described for this sequence
agaccggcggccaugauggtt

SEQ ID NO: 3261 - DNA, 21 bp, Artificial Sequence
  Description of Artificial Sequence: Target Sequence/siNA antisense region (stab05)
  misc_feature (1)..(2): 2'-deoxy-2'Fluoro
  misc_feature (4)..(5): 2'-deoxy-2'Fluoro
  misc_feature (7)..(7): 2'-deoxy-2'Fluoro
  misc_feature (10)..(11): 2'-deoxy-2'Fluoro
  misc_feature (13)..(14): 2'-deoxy-2'Fluoro
  misc_feature (17)..(19): 2'-deoxy-2'Fluoro
  misc_feature (20)..(20): Phosphorothioate or Phosphorodithioate 3'-Internucleotide Linkage (optionally present)
  misc_feature (1)..(19): ribonucleotide unmodified or modified as described for this sequence
ccaucauggccgccggucutt

SEQ ID NO: 3262 - DNA, 21 bp, Artificial Sequence
  Description of Artificial Sequence: Target Sequence/siNA sense region (stab07)
  misc_feature (1)..(1): 5'-3 attached terminal deoxyabasic moiety, inverted abasic, inverted nucleotide or other terminal cap that is optionally present
  misc_feature (21)..(21): 3'-3 attached terminal deoxyabasic moiety, inverted abasic, inverted nucleotide or other terminal cap that is optionally present
  misc_feature (4)..(5): 2'-deoxy-2'Fluoro
  misc_feature (8)..(8): 2'-deoxy-2'Fluoro
  misc_feature (11)..(12): 2'-deoxy-2'Fluoro
  misc_feature (14)..(14): 2'-deoxy-2'Fluoro
  misc_feature (17)..(17): 2'-deoxy-2'Fluoro
  misc_feature (1). .(19): ribonucleotide unmodified or modified as described for this sequence
agaccggcggccaugauggtt

SEQ ID NO: 3263 - DNA, 21 bp, Artificial Sequence
  Description of Artificial Sequence: Target Sequence/siNA antisense region (stab08)
  misc_feature (1)..(2): 2'-deoxy-2'Fluoro
  misc_feature (3)..(3): 2'-O-methyl
  misc_feature (4)..(5): 2'-deoxy-2'Fluoro
  misc_feature (6)..(6): 2'-O-methyl
  misc_feature (7)..(7): 2'-deoxy-2'Fluoro
  misc_feature (8)..(9): 2'-O-methyl
  misc_feature (10)..(11): 2'-deoxy-2'Fluoro
  misc_feature (12)..(12): 2'-O-methyl
  misc_feature (13)..(14): 2'-deoxy-2'Fluoro
  misc_feature (15)..(16): 2'-O-methyl
  misc_feature (17)..(19): 2'-deoxy-2'Fluoro
  misc_feature (20)..(20): Phosphorothioate or Phosphorodithioate 3'-Internucleotide Linkage (optionally present)
  misc_feature (1). .(19): ribonucleotide unmodified or modified as described for this sequence
ccaucauggccgccggucutt

SEQ ID NO: 3264 - DNA, 21 bp, Artificial Sequence
  Description of Artificial Sequence: Target Sequence/siNA sense region (stab09)
  misc_feature (1)..(1): 5'-3 attached terminal deoxyabasic moiety, inverted abasic, inverted nucleotide or other terminal cap that is optionally present
  misc_feature (21)..(21): 3'-3 attached terminal deoxyabasic moiety, inverted abasic, inverted nucleotide or other terminal cap that is optionally present
  misc_feature (1). .(19): ribonucleotide unmodified or modified as described for this sequence
agaccggcggccaugauggtt

SEQ ID NO: 3265 - DNA, 21 bp, Artificial Sequence
  Description of Artificial Sequence: Target Sequence/siNA antisense region (stab10)
  misc_feature (20)..(20): Phosphorothioate or Phosphorodithioate 3'-Internucleotide Linkage (optionally present)
  misc_feature (1). .(19): ribonucleotide unmodified or modified as described for this sequence
ccaucauggccgccggucutt

SEQ ID NO: 3266 - DNA, 21 bp, Artificial Sequence
  Description of Artificial Sequence: Target Sequence/siNA antisense region (stab19)
  misc_feature (21)..(21): 3'-3 attached terminal deoxyabasic moiety, inverted abasic, inverted nucleotide or other terminal cap that is optionally present
  misc_feature (1)..(2): 2'-deoxy-2'Fluoro
  misc_feature (3)..(3): 2'-O-methyl
  misc_feature (4)..(5): 2'-deoxy-2'Fluoro
  misc_feature (6)..(6): 2'-O-methyl
  misc_feature (7)..(7): 2'-deoxy-2'Fluoro
  misc_feature (8)..(9): 2'-O-methyl
  misc_feature (10)..(11): 2'-deoxy-2'Fluoro
  misc_feature (12)..(12): 2'-O-methyl
  misc_feature (13)..(14): 2'-deoxy-2'Fluoro
  misc_feature (15)..(16): 2'-O-methyl
  misc_feature (17)..(19): 2'-deoxy-2'Fluoro
  misc_feature (1). .(19): ribonucleotide unmodified or modified as described for this sequence
ccaucauggccgccggucutt

SEQ ID NO: 3267 - DNA, 21 bp, Artificial Sequence
  Description of Artificial Sequence: Target Sequence/siNA antisense region (stab22)
  misc_feature (21)..(21): 3'-3 attached terminal deoxyabasic moiety, inverted abasic, inverted nucleotide or other terminal cap that is optionally present
  misc_feature (20)..(20): Phosphorothioate or Phosphorodithioate 3'-Internucleotide Linkage (optionally present)
  misc_feature (1). .(19): ribonucleotide unmodified or modified as described for this sequence
ccaucauggccgccggucutt

SEQ ID NO: 3268 - DNA, 21 bp, Artificial Sequence
  Description of Artificial Sequence: Target Sequence/siNA antisense region (stab25)
  misc_feature (4)..(5): 2'-deoxy-2'Fluoro
  misc_feature (6)..(6): 2'-O-methyl
  misc_feature (7)..(7): 2'-deoxy-2'Fluoro
  misc_feature (8)..(9): 2'-O-methyl
  misc_feature (10)..(11): 2'-deoxy-2'Fluoro
  misc_feature (12)..(12): 2'-O-methyl
  misc_feature (13)..(14): 2'-deoxy-2'Fluoro
  misc_feature (15)..(16): 2'-O-methyl
  misc_feature (17)..(19): 2'-deoxy-2'Fluoro
  misc_feature (20)..(20): Phosphorothioate or Phosphorodithioate 3'-Internucleotide Linkage (optionally present)
  misc_feature (1). .(19): ribonucleotide unmodified or modified as described for this sequence
ccaucauggccgccggucutt

SEQ ID NO: 3269 - RNA, 21 nt, Artificial Sequence
  Description of Artificial Sequence: Target Sequence/siNA antisense region (stab35)
  misc_feature (4)..(5): 2'-deoxy-2'Fluoro
  misc_feature (6)..(6): 2'-O-methyl
  misc_feature (7)..(7): 2'-deoxy-2'Fluoro
  misc_feature (8)..(9): 2'-O-methyl
  misc_feature (10)..(11): 2'-deoxy-2'Fluoro
  misc_feature (12)..(12): 2'-O-methyl
  misc_feature (13)..(14): 2'-deoxy-2'Fluoro
  misc_feature (15)..(16): 2'-O-methyl
  misc_feature (17)..(19): 2'-deoxy-2'Fluoro
  misc_feature (20)..(21): 2'-O-methyl
ccaucauggccgccggucuuu

SEQ ID NO: 3270 - RNA, 21 nt, Artificial Sequence
  Description of Artificial Sequence: Target Sequence/siNA antisense region (stab36)
  misc_feature (4)..(5): 2'-deoxy-2'Fluoro
  misc_feature (6)..(6): 2'-O-methyl
  misc_feature (7)..(7): 2'-deoxy-2'Fluoro
  misc_feature (8)..(9): 2'-O-methyl
  misc_feature (10)..(11): 2'-deoxy-2'Fluoro
  misc_feature (12)..(12): 2'-O-methyl
  misc_feature (13)..(14): 2'-deoxy-2'Fluoro
  misc_feature (15)..(16): 2'-O-methyl
  misc_feature (17)..(19): 2'-deoxy-2'Fluoro
  misc_feature (20)..(21): 2'-O-methyl
ccaucauggccgccggucuua

SEQ ID NO: 3271 - RNA, 19 nt, Artificial Sequence
  Description of Artificial Sequence: Target Sequence/siNA sense region
gugcugaccucugguggcc

SEQ ID NO: 3272 - RNA, 19 nt, Artificial Sequence
  Description of Artificial Sequence: Target Sequence/siNA antisense region
ggccaccagaggucagcac

SEQ ID NO: 3273 - DNA, 21 bp, Artificial Sequence
  Description of Artificial Sequence: Target Sequence/siNA sense region (stab00)
  misc_feature (1)..(19): ribonucleotide unmodified or modified as described for this sequence
gugcugaccucugguggcctt

SEQ ID NO: 3274 - DNA, 21 bp, Artificial Sequence
  Description of Artificial Sequence: Target Sequence/siNA antisense region (stab00as)
  misc_feature (1). .(19): ribonucleotide unmodified or modified as described for this sequence
ggccaccagaggucagcactt

SEQ ID NO: 3275 - DNA, 21 bp, Artificial Sequence
  Description of Artificial Sequence: Target Sequence/siNA sense region (stab04)
  misc_feature (1)..(1): 5'-3 attached terminal deoxyabasic moiety, inverted abasic, inverted nucleotide or other terminal cap that is optionally present
  misc_feature (21)..(21): 3'-3 attached terminal deoxyabasic moiety, inverted abasic, inverted nucleotide or other terminal cap that is optionally present
  misc_feature (2)..(2): 2'-deoxy-2'Fluoro
  misc_feature (4)..(5): 2'-deoxy-2'Fluoro
  misc_feature (8)..(12): 2'-deoxy-2'Fluoro
  misc_feature (15)..(15): 2'-deoxy-2'Fluoro
  misc_feature (18)..(19): 2'-deoxy-2'Fluoro
  misc_feature (1). .(19): ribonucleotide unmodified or modified as described for this sequence
gugcugaccucugguggcctt

SEQ ID NO: 3276 - DNA, 21 bp, Artificial Sequence
  Description of Artificial Sequence: Target Sequence/siNA antisense region (stab05)
  misc_feature (3)..(4): 2'-deoxy-2'Fluoro
  misc_feature (6)..(7): 2'-deoxy-2'Fluoro
  misc_feature (13)..(14): 2'-deoxy-2'Fluoro
  misc_feature (17)..(17): 2'-deoxy-2'Fluoro
  misc_feature (19)..(19): 2'-deoxy-2'Fluoro
  misc_feature (20)..(20): Phosphorothioate or Phosphorodithioate 3'-Internucleotide Linkage (optionally present)
  misc_feature (1). .(19): ribonucleotide unmodified or modified as described for this sequence
ggccaccagaggucagcactt

SEQ ID NO: 3277 - DNA, 21 bp, Artificial Sequence
  Description of Artificial Sequence: Target Sequence/siNA sense region (stab07)
  misc_feature (1)..(1): 5'-3 attached terminal deoxyabasic moiety, inverted abasic, inverted nucleotide or other terminal cap that is optionally present
  misc_feature (21)..(21): 3'-3 attached terminal deoxyabasic moiety, inverted abasic, inverted nucleotide or other terminal cap that is optionally present
  misc_feature (2)..(2): 2'-deoxy-2'Fluoro
  misc_feature (4)..(5): 2'-deoxy-2'Fluoro
  misc_feature (8)..(12): 2'-deoxy-2'Fluoro
  misc_feature (15)..(15): 2'-deoxy-2'Fluoro
  misc_feature (18)..(19): 2'-deoxy-2'Fluoro
  misc_feature (1). .(19): ribonucleotide unmodified or modified as described for this sequence
gugcugaccucugguggcctt

SEQ ID NO: 3278 - DNA, 21 bp, Artificial Sequence
  Description of Artificial Sequence: Target Sequence/siNA antisense region (stab08)
  misc_feature (1)..(2): 2'-O-methyl
  misc_feature (3)..(4): 2'-deoxy-2'Fluoro
  misc_feature (5)..(5): 2'-O-methyl
  misc_feature (6)..(7): 2'-deoxy-2'Fluoro
  misc_feature (8)..(12): 2'-O-methyl
  misc_feature (13)..(14): 2'-deoxy-2'Fluoro
  misc_feature (15)..(16): 2'-O-methyl
  misc_feature (17)..(17): 2'-deoxy-2'Fluoro
  misc_feature (18)..(18): 2'-O-methyl
  misc_feature (19)..(19): 2'-deoxy-2'Fluoro
  misc_feature (20)..(20): Phosphorothioate or Phosphorodithioate 3'-Internucleotide Linkage (optionally present)
  misc_feature (1). .(19): ribonucleotide unmodified or modified as described for this sequence
ggccaccagaggucagcactt

SEQ ID NO: 3279 - DNA, 21 bp, Artificial Sequence
  Description of Artificial Sequence: Target Sequence/siNA sense region (stab09)
  misc_feature (1)..(1): 5'-3 attached terminal deoxyabasic moiety, inverted abasic, inverted nucleotide or other terminal cap that is optionally present
  misc_feature (21)..(21): 3'-3 attached terminal deoxyabasic moiety, inverted abasic, inverted nucleotide or other terminal cap that is optionally present
  misc_feature (1). .(19): ribonucleotide unmodified or modified as described for this sequence
gugcugaccucugguggcctt

SEQ ID NO: 3280 - DNA, 21 bp, Artificial Sequence
  Description of Artificial Sequence: Target Sequence/siNA antisense region (stab10)
  misc_feature (20)..(20): Phosphorothioate or Phosphorodithioate 3'-Internucleotide Linkage (optionally present)
  misc_feature (1). .(19): ribonucleotide unmodified or modified as described for this sequence
ggccaccagaggucagcactt

SEQ ID NO: 3281 - DNA, 21 bp, Artificial Sequence
  Description of Artificial Sequence: Target Sequence/siNA antisense region (stab19)
  misc_feature (21)..(21): 3'-3 attached terminal deoxyabasic moiety, inverted abasic, inverted nucleotide or other terminal cap that is optionally present
  misc_feature (1)..(2): 2'-O-methyl
  misc_feature (3)..(4): 2'-deoxy-2'Fluoro
  misc_feature (5)..(5): 2'-O-methyl
  misc_feature (6)..(7): 2'-deoxy-2'Fluoro
  misc_feature (8)..(12): 2'-O-methyl
  misc_feature (13)..(14): 2'-deoxy-2'Fluoro
  misc_feature (15)..(16): 2'-O-methyl
  misc_feature (17)..(17): 2'-deoxy-2'Fluoro
  misc_feature (18)..(18): 2'-O-methyl
  misc_feature (19)..(19): 2'-deoxy-2'Fluoro
  misc_feature (1). .(19): ribonucleotide unmodified or modified as described for this sequence
ggccaccagaggucagcactt

SEQ ID NO: 3282 - DNA, 21 bp, Artificial Sequence
  Description of Artificial Sequence: Target Sequence/siNA antisense region (stab22)
  misc_feature (21)..(21): 3'-3 attached terminal deoxyabasic moiety, inverted abasic, inverted nucleotide or other terminal cap that is optionally present
  misc_feature (20)..(20): Phosphorothioate or Phosphorodithioate 3'-Internucleotide Linkage (optionally present)
  misc_feature (1). .(19): ribonucleotide unmodified or modified as described for this sequence
ggccaccagaggucagcactt

SEQ ID NO: 3283 - DNA, 21 bp, Artificial Sequence
  Description of Artificial Sequence: Target Sequence/siNA antisense region (stab25)
  misc_feature (4)..(4): 2'-deoxy-2'Fluoro
  misc_feature (5)..(5): 2'-O-methyl
  misc_feature (6)..(7): 2'-deoxy-2'Fluoro
  misc_feature (8)..(12): 2'-O-methyl
  misc_feature (13)..(14): 2'-deoxy-2'Fluoro
  misc_feature (15)..(16): 2'-O-methyl
  misc_feature (17)..(17): 2'-deoxy-2'Fluoro
  misc_feature (18)..(18): 2'-O-methyl
  misc_feature (19)..(19): 2'-deoxy-2'Fluoro
  misc_feature (20)..(20): Phosphorothioate or Phosphorodithioate 3'-Internucleotide Linkage (optionally present)
  misc_feature (1). .(19): ribonucleotide unmodified or modified as described for this sequence
ggccaccagaggucagcactt

SEQ ID NO: 3284 - RNA, 21 nt, Artificial Sequence
  Description of Artificial Sequence: Target Sequence/siNA antisense region (stab35)
  misc_feature (4)..(4): 2'-deoxy-2'Fluoro
  misc_feature (5)..(5): 2'-O-methyl
  misc_feature (6)..(7): 2'-deoxy-2'Fluoro
  misc_feature (8)..(12): 2'-O-methyl
  misc_feature (13)..(14): 2'-deoxy-2'Fluoro
  misc_feature (15)..(16): 2'-O-methyl
  misc_feature (17)..(17): 2'-deoxy-2'Fluoro
  misc_feature (18)..(18): 2'-O-methyl
  misc_feature (19)..(19): 2'-deoxy-2'Fluoro
  misc_feature (20)..(21): 2'-O-methyl
ggccaccagaggucagcacuu

SEQ ID NO: 3285 - RNA, 21 nt, Artificial Sequence
  Description of Artificial Sequence: Target Sequence/siNA antisense region (stab36)
  misc_feature (4)..(4): 2'-deoxy-2'Fluoro
  misc_feature (5)..(5): 2'-O-methyl
  misc_feature (6)..(7): 2'-deoxy-2'Fluoro
  misc_feature (8)..(12): 2'-O-methyl
  misc_feature (13)..(14): 2'-deoxy-2'Fluoro
  misc_feature (15)..(16): 2'-O-methyl
  misc_feature (17)..(17): 2'-deoxy-2'Fluoro
  misc_feature (18)..(18): 2'-O-methyl
  misc_feature (19)..(19): 2'-deoxy-2'Fluoro
  misc_feature (20)..(21): 2'-O-methyl
ggccaccagaggucagcacca

SEQ ID NO: 3286 - RNA, 19 nt, Artificial Sequence
  Description of Artificial Sequence: Target Sequence/siNA sense region
cgaucggggcacugcaggg

SEQ ID NO: 3287 - RNA, 19 nt, Artificial Sequence
  Description of Artificial Sequence: Target Sequence/siNA antisense region
cccugcagugccccgaucg

SEQ ID NO: 3288 - DNA, 21 bp, Artificial Sequence
  Description of Artificial Sequence: Target Sequence/siNA sense region (stab00)
  misc_feature (1). .(19): ribonucleotide unmodified or modified as described for this sequence
cgaucggggcacugcagggtt

SEQ ID NO: 3289 - DNA, 21 bp, Artificial Sequence
  Description of Artificial Sequence: Target Sequence/siNA antisense region (stab00as)
  misc_feature (1). .(19): ribonucleotide unmodified or modified as described for this sequence
cccugcagugccccgaucgtt

SEQ ID NO: 3290 - DNA, 21 bp, Artificial Sequence
  Description of Artificial Sequence: Target Sequence/siNA sense region (stab04)
  misc_feature (1)..(1): 5'-3 attached terminal deoxyabasic moiety, inverted abasic, inverted nucleotide or other terminal cap that is optionally present
  misc_feature (21)..(21): 3'-3 attached terminal deoxyabasic moiety, inverted abasic, inverted nucleotide or other terminal cap that is optionally present
  misc_feature (1)..(1): 2'-deoxy-2'Fluoro
  misc_feature (4)..(5): 2'-deoxy-2'Fluoro
  misc_feature (10)..(10): 2'-deoxy-2'Fluoro
  misc_feature (12)..(13): 2'-deoxy-2'Fluoro
  misc_feature (15)..(15): 2'-deoxy-2'Fluoro
  misc_feature (1). .(19): ribonucleotide unmodified or modified as described for this sequence
cgaucggggcacugcagggtt

SEQ ID NO: 3291 - DNA, 21 bp, Artificial Sequence
  Description of Artificial Sequence: Target Sequence/siNA antisense region (stab05)
  misc_feature (1)..(4): 2'-deoxy-2'Fluoro
  misc_feature (6)..(6): 2'-deoxy-2'Fluoro
  misc_feature (9)..(9): 2'-deoxy-2'Fluoro
  misc_feature (11)..(14): 2'-deoxy-2'Fluoro
  misc_feature (17)..(18): 2'-deoxy-2'Fluoro
  misc_feature (20)..(20): Phosphorothioate or Phosphorodithioate 3'-Internucleotide Linkage (optionally present)
  misc_feature (1). .(19): ribonucleotide unmodified or modified as described for this sequence
cccugcagugccccgaucgtt

SEQ ID NO: 3292 - DNA, 21 bp, Artificial Sequence
  Description of Artificial Sequence: Target Sequence/siNA sense region (stab07)
  misc_feature (1)..(1): 5'-3 attached terminal deoxyabasic moiety, inverted abasic, inverted nucleotide or other terminal cap that is optionally present
  misc_feature (21)..(21): 3'-3 attached terminal deoxyabasic moiety, inverted abasic, inverted nucleotide or other terminal cap that is optionally present
  misc_feature (1)..(1): 2'-deoxy-2'Fluoro
  misc_feature (4)..(5): 2'-deoxy-2'Fluoro
  misc_feature (10)..(10): 2'-deoxy-2'Fluoro
  misc_feature (12)..(13): 2'-deoxy-2'Fluoro
  misc_feature (15)..(15): 2'-deoxy-2'Fluoro
  misc_feature (1). .(19): ribonucleotide unmodified or modified as described for this sequence
cgaucggggcacugcagggtt

SEQ ID NO: 3293 - DNA, 21 bp, Artificial Sequence
  Description of Artificial Sequence: Target Sequence/siNA antisense region (stab08)
  misc_feature (1)..(4): 2'-deoxy-2'Fluoro
  misc_feature (5)..(5): 2'-O-methyl
  misc_feature (6)..(6): 2'-deoxy-2'Fluoro
  misc_feature (7)..(8): 2'-O-methyl
  misc_feature (9)..(9): 2'-deoxy-2'Fluoro
  misc_feature (10)..(10): 2'-O-methyl
  misc_feature (11)..(14): 2'-deoxy-2'Fluoro
  misc_feature (15)..(16): 2'-O-methyl
  misc_feature (17)..(18): 2'-deoxy-2'Fluoro
  misc_feature (19)..(19): 2'-O-methyl
  misc_feature (20)..(20): Phosphorothioate or Phosphorodithioate 3'-Internucleotide Linkage (optionally present)
  misc_feature (1). .(19): ribonucleotide unmodified or modified as described for this sequence
cccugcagugccccgaucgtt

SEQ ID NO: 3294 - DNA, 21 bp, Artificial Sequence
  Description of Artificial Sequence: Target Sequence/siNA sense region (stab09)
  misc_feature (1)..(1): 5'-3 attached terminal deoxyabasic moiety, inverted abasic, inverted nucleotide or other terminal cap that is optionally present
  misc_feature (21)..(21): 3'-3 attached terminal deoxyabasic moiety, inverted abasic, inverted nucleotide or other terminal cap that is optionally present
  misc_feature (1). .(19): ribonucleotide unmodified or modified as described for this sequence
cgaucggggcacugcagggtt

SEQ ID NO: 3295 - DNA, 21 bp, Artificial Sequence
  Description of Artificial Sequence: Target Sequence/siNA antisense region (stab10)
  misc_feature (20)..(20): Phosphorothioate or Phosphorodithioate 3'-Internucleotide Linkage (optionally present)
  misc_feature (1). .(19): ribonucleotide unmodified or modified as described for this sequence
cccugcagugccccgaucgtt

SEQ ID NO: 3296 - DNA, 21 bp, Artificial Sequence
  Description of Artificial Sequence: Target Sequence/siNA antisense region (stab19)
  misc_feature (21)..(21): 3'-3 attached terminal deoxyabasic moiety, inverted abasic, inverted nucleotide or other terminal cap that is optionally present
  misc_feature (1)..(4): 2'-deoxy-2'Fluoro
  misc_feature (5)..(5): 2'-O-methyl
  misc_feature (6)..(6): 2'-deoxy-2'Fluoro
  misc_feature (7)..(8): 2'-O-methyl
  misc_feature (9)..(9): 2'-deoxy-2'Fluoro
  misc_feature (10)..(10): 2'-O-methyl
  misc_feature (11)..(14): 2'-deoxy-2'Fluoro
  misc_feature (15)..(16): 2'-O-methyl
  misc_feature (17)..(18): 2'-deoxy-2'Fluoro
  misc_feature (19)..(19): 2'-O-methyl
  misc_feature (1). .(19): ribonucleotide unmodified or modified as described for this sequence
cccugcagugccccgaucgtt

SEQ ID NO: 3297 - DNA, 21 bp, Artificial Sequence
  Description of Artificial Sequence: Target Sequence/siNA antisense region (stab22)
  misc_feature (21)..(21): 3'-3 attached terminal deoxyabasic moiety, inverted abasic, inverted nucleotide or other terminal cap that is optionally present
  misc_feature (20)..(20): Phosphorothioate or Phosphorodithioate 3'-Internucleotide Linkage (optionally present)
  misc_feature (1). .(19): ribonucleotide unmodified or modified as described for this sequence
cccugcagugccccgaucgtt

SEQ ID NO: 3298 - DNA, 21 bp, Artificial Sequence
  Description of Artificial Sequence: Target Sequence/siNA antisense region (stab25)
  misc_feature (4)..(4): 2'-deoxy-2'Fluoro
  misc_feature (5)..(5): 2'-O-methyl
  misc_feature (6)..(6): 2'-deoxy-2'Fluoro
  misc_feature (7)..(8): 2'-O-methyl
  misc_feature (9)..(9): 2'-deoxy-2'Fluoro
  misc_feature (10)..(10): 2'-O-methyl
  misc_feature (11)..(14): 2'-deoxy-2'Fluoro
  misc_feature (15)..(16): 2'-O-methyl
  misc_feature (17)..(18): 2'-deoxy-2'Fluoro
  misc_feature (19)..(19): 2'-O-methyl
  misc_feature (20)..(20): Phosphorothioate or Phosphorodithioate 3'-Internucleotide Linkage (optionally present)
  misc_feature (1). .(19): ribonucleotide unmodified or modified as described for this sequence
cccugcagugccccgaucgtt

SEQ ID NO: 3299 - RNA, 21 nt, Artificial Sequence
  Description of Artificial Sequence: Target Sequence/siNA antisense region (stab35)
  misc_feature (4)..(4): 2'-deoxy-2'Fluoro
  misc_feature (5)..(5): 2'-O-methyl
  misc_feature (6)..(6): 2'-deoxy-2'Fluoro
  misc_feature (7)..(8): 2'-O-methyl
  misc_feature (9)..(9): 2'-deoxy-2'Fluoro
  misc_feature (10)..(10): 2'-O-methyl
  misc_feature (11)..(14): 2'-deoxy-2'Fluoro
  misc_feature (15)..(16): 2'-O-methyl
  misc_feature (17)..(18): 2'-deoxy-2'Fluoro
  misc_feature (19)..(21): 2'-O-methyl
cccugcagugccccgaucguu

SEQ ID NO: 3300 - RNA, 21 nt, Artificial Sequence
  Description of Artificial Sequence: Target Sequence/siNA antisense region (stab36)
  misc_feature (4)..(4): 2'-deoxy-2'Fluoro
  misc_feature (5)..(5): 2'-O-methyl
  misc_feature (6)..(6): 2'-deoxy-2'Fluoro
  misc_feature (7)..(8): 2'-O-methyl
  misc_feature (9)..(9): 2'-deoxy-2'Fluoro
  misc_feature (10)..(10): 2'-O-methyl
  misc_feature (11)..(14): 2'-deoxy-2'Fluoro
  misc_feature (15)..(16): 2'-O-methyl
  misc_feature (17)..(18): 2'-deoxy-2'Fluoro
  misc_feature (19)..(21): 2'-O-methyl
cccugcagugccccgaucggc

SEQ ID NO: 3301 - RNA, 19 nt, Artificial Sequence
  Description of Artificial Sequence: Target Sequence/siNA sense region
ggccgagccauuuuggggg

SEQ ID NO: 3302 - RNA, 19 nt, Artificial Sequence
  Description of Artificial Sequence: Target Sequence/siNA antisense region
cccccaaaauggcucggcc

SEQ ID NO: 3303 - DNA, 21 bp, Artificial Sequence
  Description of Artificial Sequence: Target Sequence/siNA sense region (stab00)
  misc_feature (1). .(19): ribonucleotide unmodified or modified as described for this sequence
ggccgagccauuuugggggtt

SEQ ID NO: 3304 - DNA, 21 bp, Artificial Sequence
  Description of Artificial Sequence: Target Sequence/siNA antisense region (stab00as)
  misc_feature (1). .(19): ribonucleotide unmodified or modified as described for this sequence
cccccaaaauggcucggcctt

SEQ ID NO: 3305 - DNA, 21 bp, Artificial Sequence
  Description of Artificial Sequence: Target Sequence/siNA sense region (stab04)
  misc_feature (1)..(1): 5'-3 attached terminal deoxyabasic moiety, inverted abasic, inverted nucleotide or other terminal cap that is optionally present
  misc_feature (21)..(21): 3'-3 attached terminal deoxyabasic moiety, inverted abasic, inverted nucleotide or other terminal cap that is optionally present
  misc_feature (3)..(4): 2'-deoxy-2'Fluoro
  misc_feature (8)..(9): 2'-deoxy-2'Fluoro
  misc_feature (11)..(14): 2'-deoxy-2'Fluoro
  misc_feature (1). .(19): ribonucleotide unmodified or modified as described for this sequence
ggccgagccauuuugggggtt

SEQ ID NO: 3306 - DNA, 21 bp, Artificial Sequence
  Description of Artificial Sequence: Target Sequence/siNA antisense region (stab05)
  misc_feature (1)..(5): 2'-deoxy-2'Fluoro
  misc_feature (10)..(10): 2'-deoxy-2'Fluoro
  misc_feature (13)..(15): 2'-deoxy-2'Fluoro
  misc_feature (18)..(19): 2'-deoxy-2'Fluoro
  misc_feature (20)..(20): Phosphorothioate or Phosphorodithioate 3'-Internucleotide Linkage (optionally present)
  misc_feature (1). .(19): ribonucleotide unmodified or modified as described for this sequence
cccccaaaauggcucggcctt

SEQ ID NO: 3307 - DNA, 21 bp, Artificial Sequence
  Description of Artificial Sequence: Target Sequence/siNA sense region (stab07)
  misc_feature (1)..(1): 5'-3 attached terminal deoxyabasic moiety, inverted abasic, inverted nucleotide or other terminal cap that is optionally present
  misc_feature (21)..(21): 3'-3 attached terminal deoxyabasic moiety, inverted abasic, inverted nucleotide or other terminal cap that is optionally present
  misc_feature (3)..(4): 2'-deoxy-2'Fluoro
  misc_feature (8)..(9): 2'-deoxy-2'Fluoro
  misc_feature (11)..(14): 2'-deoxy-2'Fluoro
  misc_feature (1). .(19): ribonucleotide unmodified or modified as described for this sequence
ggccgagccauuuugggggtt

SEQ ID NO: 3308 - DNA, 21 bp, Artificial Sequence
  Description of Artificial Sequence: Target Sequence/siNA antisense region (stab08)
  misc_feature (1)..(5): 2'-deoxy-2'Fluoro
  misc_feature (6)..(9): 2'-O-methyl
  misc_feature (10)..(10): 2'-deoxy-2'Fluoro
  misc_feature (11)..(12): 2'-O-methyl
  misc_feature (13)..(15): 2'-deoxy-2'Fluoro
  misc_feature (16)..(17): 2'-O-methyl
  misc_feature (18)..(19): 2'-deoxy-2'Fluoro
  misc_feature (20)..(20): Phosphorothioate or Phosphorodithioate 3'-Internucleotide Linkage (optionally present)
  misc_feature (1). .(19): ribonucleotide unmodified or modified as described for this sequence
cccccaaaauggcucggcctt

SEQ ID NO: 3309 - DNA, 21 bp, Artificial Sequence
  Description of Artificial Sequence: Target Sequence/siNA sense region (stab09)
  misc_feature (1)..(1): 5'-3 attached terminal deoxyabasic moiety, inverted abasic, inverted nucleotide or other terminal cap that is optionally present
  misc_feature (21)..(21): 3'-3 attached terminal deoxyabasic moiety, inverted abasic, inverted nucleotide or other terminal cap that is optionally present
  misc_feature (1). .(19): ribonucleotide unmodified or modified as described for this sequence
ggccgagccauuuugggggtt

SEQ ID NO: 3310 - DNA, 21 bp, Artificial Sequence
  Description of Artificial Sequence: Target Sequence/siNA antisense region (stab10)
  misc_feature (20)..(20): Phosphorothioate or Phosphorodithioate 3'-Internucleotide Linkage (optionally present)
  misc_feature (1). .(19): ribonucleotide unmodified or modified as described for this sequence
cccccaaaauggcucggcctt

SEQ ID NO: 3311 - DNA, 21 bp, Artificial Sequence
  Description of Artificial Sequence: Target Sequence/siNA antisense region (stab19)
  misc_feature (21)..(21): 3'-3 attached terminal deoxyabasic moiety, inverted abasic, inverted nucleotide or other terminal cap that is optionally present
  misc_feature (1)..(5): 2'-deoxy-2'Fluoro
  misc_feature (6)..(9): 2'-O-methyl
  misc_feature (10)..(10): 2'-deoxy-2'Fluoro
  misc_feature (11)..(12): 2'-O-methyl
  misc_feature (13)..(15): 2'-deoxy-2'Fluoro
  misc_feature (16)..(17): 2'-O-methyl
  misc_feature (18)..(19): 2'-deoxy-2'Fluoro
  misc_feature (1). .(19): ribonucleotide unmodified or modified as described for this sequence
cccccaaaauggcucggcctt

SEQ ID NO: 3312 - DNA, 21 bp, Artificial Sequence
  Description of Artificial Sequence: Target Sequence/siNA antisense region (stab22)
  misc_feature (21)..(21): 3'-3 attached terminal deoxyabasic moiety, inverted abasic, inverted nucleotide or other terminal cap that is optionally present
  misc_feature (20)..(20): Phosphorothioate or Phosphorodithioate 3'-Internucleotide Linkage (optionally present)
  misc_feature (1). .(19): ribonucleotide unmodified or modified as described for this sequence
cccccaaaauggcucggcctt

SEQ ID NO: 3313 - DNA, 21 bp, Artificial Sequence
  Description of Artificial Sequence: Target Sequence/siNA antisense region (stab25)
  misc_feature (4)..(5): 2'-deoxy-2'Fluoro
  misc_feature (6)..(9): 2'-O-methyl
  misc_feature (10)..(10): 2'-deoxy-2'Fluoro
  misc_feature (11)..(12): 2'-O-methyl
  misc_feature (13)..(15): 2'-deoxy-2'Fluoro
  misc_feature (16)..(17): 2'-O-methyl
  misc_feature (18)..(19): 2'-deoxy-2'Fluoro
  misc_feature (20)..(20): Phosphorothioate or Phosphorodithioate 3'-Internucleotide Linkage (optionally present)
  misc_feature (1). .(19): ribonucleotide unmodified or modified as described for this sequence
cccccaaaauggcucggcctt

SEQ ID NO: 3314 - RNA, 21 nt, Artificial Sequence
  Description of Artificial Sequence: Target Sequence/siNA antisense region (stab35)
  misc_feature (4)..(5): 2'-deoxy-2'Fluoro
  misc_feature (6)..(9): 2'-O-methyl
  misc_feature (10)..(10): 2'-deoxy-2'Fluoro
  misc_feature (11)..(12): 2'-O-methyl
  misc_feature (13)..(15): 2'-deoxy-2'Fluoro
  misc_feature (16)..(17): 2'-O-methyl
  misc_feature (18)..(19): 2'-deoxy-2'Fluoro
  misc_feature (20)..(21): 2'-O-methyl
cccccaaaauggcucggccuu

SEQ ID NO: 3315 - RNA, 21 nt, Artificial Sequence
  Description of Artificial Sequence: Target Sequence/siNA antisense region (stab36)
  misc_feature (4)..(5): 2'-deoxy-2'Fluoro
  misc_feature (6)..(9): 2'-O-methyl
  misc_feature (10)..(10): 2'-deoxy-2'Fluoro
  misc_feature (11)..(12): 2'-O-methyl
  misc_feature (13)..(15): 2'-deoxy-2'Fluoro
  misc_feature (16)..(17): 2'-O-methyl
  misc_feature (18)..(19): 2'-deoxy-2'Fluoro
  misc_feature (20)..(21): 2'-O-methyl
cccccaaaauggcucggcccc

SEQ ID NO: 3316 - RNA, 19 nt, Artificial Sequence
  Description of Artificial Sequence: Target Sequence/siNA sense region
ggccccccuccuugcucug

SEQ ID NO: 3317 - RNA, 19 nt, Artificial Sequence
  Description of Artificial Sequence: Target Sequence/siNA antisense region
cagagcaaggaggggggcc

SEQ ID NO: 3318 - DNA, 21 bp, Artificial Sequence
  Description of Artificial Sequence: Target Sequence/siNA sense region (stab00)
  misc_feature (1). .(19): ribonucleotide unmodified or modified as described for this sequence
ggccccccuccuugcucugtt

SEQ ID NO: 3319 - DNA, 21 bp, Artificial Sequence
  Description of Artificial Sequence: Target Sequence/siNA antisense region (stab00as)
  misc_feature (1). .(19): ribonucleotide unmodified or modified as described for this sequence
cagagcaaggaggggggcctt

SEQ ID NO: 3320 - DNA, 21 bp, Artificial Sequence
  Description of Artificial Sequence: Target Sequence/siNA sense region (stab04)
  misc_feature (1)..(1): 5'-3 attached terminal deoxyabasic moiety, inverted abasic, inverted nucleotide or other terminal cap that is optionally present
  misc_feature (21)..(21): 3'-3 attached terminal deoxyabasic moiety, inverted abasic, inverted nucleotide or other terminal cap that is optionally present
  misc_feature (3)..(13): 2'-deoxy-2'Fluoro
  misc_feature (15)..(18): 2'-deoxy-2'Fluoro
  misc_feature (1). .(19): ribonucleotide unmodified or modified as described for this sequence
ggccccccuccuugcucugtt

SEQ ID NO: 3321 - DNA, 21 bp, Artificial Sequence
  Description of Artificial Sequence: Target Sequence/siNA antisense region (stab05)
  misc_feature (1)..(1): 2'-deoxy-2'Fluoro
  misc_feature (6)..(6): 2'-deoxy-2'Fluoro
  misc_feature (18)..(19): 2'-deoxy-2'Fluoro
  misc_feature (20)..(20): Phosphorothioate or Phosphorodithioate 3'-Internucleotide Linkage (optionally present)
  misc_feature (1). .(19): ribonucleotide unmodified or modified as described for this sequence
cagagcaaggaggggggcctt

SEQ ID NO: 3322 - DNA, 21 bp, Artificial Sequence
  Description of Artificial Sequence: Target Sequence/siNA sense region (stab07)
  misc_feature (1)..(1): 5'-3 attached terminal deoxyabasic moiety, inverted abasic, inverted nucleotide or other terminal cap that is optionally present
  misc_feature (21)..(21): 3'-3 attached terminal deoxyabasic moiety, inverted abasic, inverted nucleotide or other terminal cap that is optionally present
  misc_feature (3)..(13): 2'-deoxy-2'Fluoro
  misc_feature (15)..(18): 2'-deoxy-2'Fluoro
  misc_feature (1). .(19): ribonucleotide unmodified or modified as described for this sequence
ggccccccuccuugcucugtt

SEQ ID NO: 3323 - DNA, 21 bp, Artificial Sequence
  Description of Artificial Sequence: Target Sequence/siNA antisense region (stab08)
  misc_feature (1)..(1): 2'-deoxy-2'Fluoro
  misc_feature (2)..(5): 2'-O-methyl
  misc_feature (6)..(6): 2'-deoxy-2'Fluoro
  misc_feature (7)..(17): 2'-O-methyl
  misc_feature (18)..(19): 2'-deoxy-2'Fluoro
  misc_feature (20)..(20): Phosphorothioate or Phosphorodithioate 3'-Internucleotide Linkage (optionally present)
  misc_feature (1). .(19): ribonucleotide unmodified or modified as described for this sequence
cagagcaaggaggggggcctt

SEQ ID NO: 3324 - DNA, 21 bp, Artificial Sequence
  Description of Artificial Sequence: Target Sequence/siNA sense region (stab09)
  misc_feature (1)..(1): 5'-3 attached terminal deoxyabasic moiety, inverted abasic, inverted nucleotide or other terminal cap that is optionally present
  misc_feature (21)..(21): 3'-3 attached terminal deoxyabasic moiety, inverted abasic, inverted nucleotide or other terminal cap that is optionally present
  misc_feature (1). .(19): ribonucleotide unmodified or modified as described for this sequence
ggccccccuccuugcucugtt

SEQ ID NO: 3325 - DNA, 21 bp, Artificial Sequence
  Description of Artificial Sequence: Target Sequence/siNA antisense region (stab10)
  misc_feature (20)..(20): Phosphorothioate or Phosphorodithioate 3'-Internucleotide Linkage (optionally present)
  misc_feature (1). .(19): ribonucleotide unmodified or modified as described for this sequence
cagagcaaggaggggggcctt

SEQ ID NO: 3326 - DNA, 21 bp, Artificial Sequence
  Description of Artificial Sequence: Target Sequence/siNA antisense region (stab19)
  misc_feature (21)..(21): 3'-3 attached terminal deoxyabasic moiety, inverted abasic, inverted nucleotide or other terminal cap that is optionally present
  misc_feature (1)..(1): 2'-deoxy-2'Fluoro
  misc_feature (2)..(5): 2'-O-methyl
  misc_feature (6)..(6): 2'-deoxy-2'Fluoro
  misc_feature (7)..(17): 2'-O-methyl
  misc_feature (18)..(19): 2'-deoxy-2'Fluoro
  misc_feature (1). .(19): ribonucleotide unmodified or modified as described for this sequence
cagagcaaggaggggggcctt

SEQ ID NO: 3327 - DNA, 21 bp, Artificial Sequence
  Description of Artificial Sequence: Target Sequence/siNA antisense region (stab22)
  misc_feature (21)..(21): 3'-3 attached terminal deoxyabasic moiety, inverted abasic, inverted nucleotide or other terminal cap that is optionally present
  misc_feature (20)..(20): Phosphorothioate or Phosphorodithioate 3'-Internucleotide Linkage (optionally present)
  misc_feature (1). .(19): ribonucleotide unmodified or modified as described for this sequence
cagagcaaggaggggggcctt

SEQ ID NO: 3328 - DNA, 21 bp, Artificial Sequence
  Description of Artificial Sequence: Target Sequence/siNA antisense region (stab25)
  misc_feature (4)..(5): 2'-O-methyl
  misc_feature (6)..(6): 2'-deoxy-2'Fluoro
  misc_feature (7)..(17): 2'-O-methyl
  misc_feature (18)..(19): 2'-deoxy-2'Fluoro
  misc_feature (20)..(20): Phosphorothioate or Phosphorodithioate 3'-Internucleotide Linkage (optionally present)
  misc_feature (1). .(19): ribonucleotide unmodified or modified as described for this sequence
cagagcaaggaggggggcctt

SEQ ID NO: 3329 - RNA, 21 nt, Artificial Sequence
  Description of Artificial Sequence: Target Sequence/siNA antisense region (stab35)
  misc_feature (4)..(5): 2'-O-methyl
  misc_feature (6)..(6): 2'-deoxy-2'Fluoro
  misc_feature (7)..(17): 2'-O-methyl
  misc_feature (18)..(19): 2'-deoxy-2'Fluoro
  misc_feature (20)..(21): 2'-O-methyl
cagagcaaggaggggggccuu

SEQ ID NO: 3330 - RNA, 21 nt, Artificial Sequence
  Description of Artificial Sequence: Target Sequence/siNA antisense region (stab36)
  misc_feature (4)..(5): 2'-O-methyl
  misc_feature (6)..(6): 2'-deoxy-2'Fluoro
  misc_feature (7)..(17): 2'-O-methyl
  misc_feature (18)..(19): 2'-deoxy-2'Fluoro
  misc_feature (20)..(21): 2'-O-methyl
cagagcaaggaggggggcccc

SEQ ID NO: 3331 - RNA, 19 nt, Artificial Sequence
  Description of Artificial Sequence: Target Sequence/siNA sense region
gcaggcaccuuaguggcuu

SEQ ID NO: 3332 - RNA, 19 nt, Artificial Sequence
  Description of Artificial Sequence: Target Sequence/siNA antisense region
aagccacuaaggugccugc

SEQ ID NO: 3333 - DNA, 21 bp, Artificial Sequence
  Description of Artificial Sequence: Target Sequence/siNA sense region (stab00)
  misc_feature (1). .(19): ribonucleotide unmodified or modified as described for this sequence
gcaggcaccuuaguggcuutt

SEQ ID NO: 3334 - DNA, 21 bp, Artificial Sequence
  Description of Artificial Sequence: Target Sequence/siNA antisense region (stab00as)
  misc_feature (1). .(19): ribonucleotide unmodified or modified as described for this sequence
aagccacuaaggugccugctt

SEQ ID NO: 3335 - DNA, 21 bp, Artificial Sequence
  Description of Artificial Sequence: Target Sequence/siNA sense region (stab04)
  misc_feature (1)..(1): 5'-3 attached terminal deoxyabasic moiety, inverted abasic, inverted nucleotide or other terminal cap that is optionally present
  misc_feature (21)..(21): 3'-3 attached terminal deoxyabasic moiety, inverted abasic, inverted nucleotide or other terminal cap that is optionally present
  misc_feature (2)..(2): 2'-deoxy-2'Fluoro
  misc_feature (6)..(6): 2'-deoxy-2'Fluoro
  misc_feature (8)..(11): 2'-deoxy-2'Fluoro
  misc_feature (14)..(14): 2'-deoxy-2'Fluoro
  misc_feature (17)..(19): 2'-deoxy-2'Fluoro
  misc_feature (1). .(19): ribonucleotide unmodified or modified as described for this sequence
gcaggcaccuuaguggcuutt

SEQ ID NO: 3336 - DNA, 21 bp, Artificial Sequence
  Description of Artificial Sequence: Target Sequence/siNA antisense region (stab05)
  misc_feature (4)..(5): 2'-deoxy-2'Fluoro
  misc_feature (7)..(8): 2'-deoxy-2'Fluoro
  misc_feature (13)..(13): 2'-deoxy-2'Fluoro
  misc_feature (15)..(17): 2'-deoxy-2'Fluoro
  misc_feature (19)..(19): 2'-deoxy-2'Fluoro
  misc_feature (20)..(20): Phosphorothioate or Phosphorodithioate 3'-Internucleotide Linkage (optionally present)
  misc_feature (1). .(19): ribonucleotide unmodified or modified as described for this sequence
aagccacuaaggugccugctt

SEQ ID NO: 3337 - DNA, 21 bp, Artificial Sequence
  Description of Artificial Sequence: Target Sequence/siNA sense region (stab07)
  misc_feature (1)..(1): 5'-3 attached terminal deoxyabasic moiety, inverted abasic, inverted nucleotide or other terminal cap that is optionally present
  misc_feature (21)..(21): 3'-3 attached terminal deoxyabasic moiety, inverted abasic, inverted nucleotide or other terminal cap that is optionally present
  misc_feature (2)..(2): 2'-deoxy-2'Fluoro
  misc_feature (6)..(6): 2'-deoxy-2'Fluoro
  misc_feature (8)..(11): 2'-deoxy-2'Fluoro
  misc_feature (14)..(14): 2'-deoxy-2'Fluoro
  misc_feature (17)..(19): 2'-deoxy-2'Fluoro
  misc_feature (1). .(19): ribonucleotide unmodified or modified as described for this sequence
gcaggcaccuuaguggcuutt

SEQ ID NO: 3338 - DNA, 21 bp, Artificial Sequence
  Description of Artificial Sequence: Target Sequence/siNA antisense region (stab08)
  misc_feature (1)..(3): 2'-O-methyl
  misc_feature (4)..(5): 2'-deoxy-2'Fluoro
  misc_feature (6)..(6): 2'-O-methyl
  misc_feature (7)..(8): 2'-deoxy-2'Fluoro
  misc_feature (9)..(12): 2'-O-methyl
  misc_feature (13)..(13): 2'-deoxy-2'Fluoro
  misc_feature (14)..(14): 2'-O-methyl
  misc_feature (15)..(17): 2'-deoxy-2'Fluoro
  misc_feature (18)..(18): 2'-O-methyl
  misc_feature (19)..(19): 2'-deoxy-2'Fluoro
  misc_feature (20)..(20): Phosphorothioate or Phosphorodithioate 3'-Internucleotide Linkage (optionally present)
  misc_feature (1). .(19): ribonucleotide unmodified or modified as described for this sequence
aagccacuaaggugccugctt

SEQ ID NO: 3339 - DNA, 21 bp, Artificial Sequence
  Description of Artificial Sequence: Target Sequence/siNA sense region (stab09)
  misc_feature (1)..(1): 5'-3 attached terminal deoxyabasic moiety, inverted abasic, inverted nucleotide or other terminal cap that is optionally present
  misc_feature (21)..(21): 3'-3 attached terminal deoxyabasic moiety, inverted abasic, inverted nucleotide or other terminal cap that is optionally present
  misc_feature (1). .(19): ribonucleotide unmodified or modified as described for this sequence
gcaggcaccuuaguggcuutt

SEQ ID NO: 3340 - DNA, 21 bp, Artificial Sequence
  Description of Artificial Sequence: Target Sequence/siNA antisense region (stab10)
  misc_feature (20)..(20): Phosphorothioate or Phosphorodithioate 3'-Internucleotide Linkage (optionally present)
  misc_feature (1). .(19): ribonucleotide unmodified or modified as described for this sequence
aagccacuaaggugccugctt

SEQ ID NO: 3341 - DNA, 21 bp, Artificial Sequence
  Description of Artificial Sequence: Target Sequence/siNA antisense region (stab19)
  misc_feature (21)..(21): 3'-3 attached terminal deoxyabasic moiety, inverted abasic, inverted nucleotide or other terminal cap that is optionally present
  misc_feature (1)..(3): 2'-O-methyl
  misc_feature (4)..(5): 2'-deoxy-2'Fluoro
  misc_feature (6)..(6): 2'-O-methyl
  misc_feature (7)..(8): 2'-deoxy-2'Fluoro
  misc_feature (9)..(12): 2'-O-methyl
  misc_feature (13)..(13): 2'-deoxy-2'Fluoro
  misc_feature (14)..(14): 2'-O-methyl
  misc_feature (15)..(17): 2'-deoxy-2'Fluoro
  misc_feature (18)..(18): 2'-O-methyl
  misc_feature (19)..(19): 2'-deoxy-2'Fluoro
  misc_feature (1). .(19): ribonucleotide unmodified or modified as described for this sequence
aagccacuaaggugccugctt

SEQ ID NO: 3342 - DNA, 21 bp, Artificial Sequence
  Description of Artificial Sequence: Target Sequence/siNA antisense region (stab22)
  misc_feature (21)..(21): 3'-3 attached terminal deoxyabasic moiety, inverted abasic, inverted nucleotide or other terminal cap that is optionally present
  misc_feature (20)..(20): Phosphorothioate or Phosphorodithioate 3'-Internucleotide Linkage (optionally present)
  misc_feature (1). .(19): ribonucleotide unmodified or modified as described for this sequence
aagccacuaaggugccugctt

SEQ ID NO: 3343 - DNA, 21 bp, Artificial Sequence
  Description of Artificial Sequence: Target Sequence/siNA antisense region (stab25)
  misc_feature (4)..(5): 2'-deoxy-2'Fluoro
  misc_feature (6)..(6): 2'-O-methyl
  misc_feature (7)..(8): 2'-deoxy-2'Fluoro
  misc_feature (9)..(12): 2'-O-methyl
  misc_feature (13)..(13): 2'-deoxy-2'Fluoro
  misc_feature (14)..(14): 2'-O-methyl
  misc_feature (15)..(17): 2'-deoxy-2'Fluoro
  misc_feature (18)..(18): 2'-O-methyl
  misc_feature (19)..(19): 2'-deoxy-2'Fluoro
  misc_feature (20)..(20): Phosphorothioate or Phosphorodithioate 3'-Internucleotide Linkage (optionally present)
  misc_feature (1). .(19): ribonucleotide unmodified or modified as described for this sequence
aagccacuaaggugccugctt

SEQ ID NO: 3344 - RNA, 21 nt, Artificial Sequence
  Description of Artificial Sequence: Target Sequence/siNA antisense region (stab35)
  misc_feature (4)..(5): 2'-deoxy-2'Fluoro
  misc_feature (6)..(6): 2'-O-methyl
  misc_feature (7)..(8): 2'-deoxy-2'Fluoro
  misc_feature (9)..(12): 2'-O-methyl
  misc_feature (13)..(13): 2'-deoxy-2'Fluoro
  misc_feature (14)..(14): 2'-O-methyl
  misc_feature (15)..(17): 2'-deoxy-2'Fluoro
  misc_feature (18)..(18): 2'-O-methyl
  misc_feature (19)..(19): 2'-deoxy-2'Fluoro
  misc_feature (20)..(21): 2'-O-methyl
aagccacuaaggugccugcuu

SEQ ID NO: 3345 - RNA, 21 nt, Artificial Sequence
  Description of Artificial Sequence: Target Sequence/siNA antisense region (stab36)
  misc_feature (4)..(5): 2'-deoxy-2'Fluoro
  misc_feature (6)..(6): 2'-O-methyl
  misc_feature (7)..(8): 2'-deoxy-2'Fluoro
  misc_feature (9)..(12): 2'-O-methyl
  misc_feature (13)..(13): 2'-deoxy-2'Fluoro
  misc_feature (14)..(14): 2'-O-methyl
  misc_feature (15)..(17): 2'-deoxy-2'Fluoro
  misc_feature (18)..(18): 2'-O-methyl
  misc_feature (19)..(19): 2'-deoxy-2'Fluoro
  misc_feature (20)..(21): 2'-O-methyl
aagccacuaaggugccugcag

SEQ ID NO: 3346 - RNA, 19 nt, Artificial Sequence
  Description of Artificial Sequence: Target Sequence/siNA sense region
uuuuuccuccuguguacag

SEQ ID NO: 3347 - RNA, 19 nt, Artificial Sequence
  Description of Artificial Sequence: Target Sequence/siNA antisense region
cuguacacaggaggaaaaa

SEQ ID NO: 3348 - DNA, 21 bp, Artificial Sequence
  Description of Artificial Sequence: Target Sequence/siNA sense region (stab00)
  misc_feature (1). .(19): ribonucleotide unmodified or modified as described for this sequence
uuuuuccuccuguguacagtt

SEQ ID NO: 3349 - DNA, 21 bp, Artificial Sequence
  Description of Artificial Sequence: Target Sequence/siNA antisense region (stab00as)
  misc_feature (1). .(19): ribonucleotide unmodified or modified as described for this sequence
cuguacacaggaggaaaaatt

SEQ ID NO: 3350 - DNA, 21 bp, Artificial Sequence
  Description of Artificial Sequence: Target Sequence/siNA sense region (stab04)
  misc_feature (1)..(1): 5'-3 attached terminal deoxyabasic moiety, inverted abasic, inverted nucleotide or other terminal cap that is optionally present
  misc_feature (21)..(21): 3'-3 attached terminal deoxyabasic moiety, inverted abasic, inverted nucleotide or other terminal cap that is optionally present
  misc_feature (1)..(11): 2'-deoxy-2'Fluoro
  misc_feature (13)..(13): 2'-deoxy-2'Fluoro
  misc_feature (15)..(15): 2'-deoxy-2'Fluoro
  misc_feature (17)..(17): 2'-deoxy-2'Fluoro
  misc_feature (1). .(19): ribonucleotide unmodified or modified as described for this sequence
uuuuuccuccuguguacagtt

SEQ ID NO: 3351 - DNA, 21 bp, Artificial Sequence
  Description of Artificial Sequence: Target Sequence/siNA antisense region (stab05)
  misc_feature (1)..(2): 2'-deoxy-2'Fluoro
  misc_feature (4)..(4): 2'-deoxy-2'Fluoro
  misc_feature (6)..(6): 2'-deoxy-2'Fluoro
  misc_feature (8)..(8): 2'-deoxy-2'Fluoro
  misc_feature (20)..(20): Phosphorothioate or Phosphorodithioate 3'-Internucleotide Linkage (optionally present)
  misc_feature (1). .(19): ribonucleotide unmodified or modified as described for this sequence
cuguacacaggaggaaaaatt

SEQ ID NO: 3352 - DNA, 21 bp, Artificial Sequence
  Description of Artificial Sequence: Target Sequence/siNA sense region (stab07)
  misc_feature (1)..(1): 5'-3 attached terminal deoxyabasic moiety, inverted abasic, inverted nucleotide or other terminal cap that is optionally present
  misc_feature (21)..(21): 3'-3 attached terminal deoxyabasic moiety, inverted abasic, inverted nucleotide or other terminal cap that is optionally present
  misc_feature (1)..(11): 2'-deoxy-2'Fluoro
  misc_feature (13)..(13): 2'-deoxy-2'Fluoro
  misc_feature (15)..(15): 2'-deoxy-2'Fluoro
  misc_feature (17)..(17): 2'-deoxy-2'Fluoro
  misc_feature (1). .(19): ribonucleotide unmodified or modified as described for this sequence
uuuuuccuccuguguacagtt

SEQ ID NO: 3353 - DNA, 21 bp, Artificial Sequence
  Description of Artificial Sequence: Target Sequence/siNA antisense region (stab08)
  misc_feature (1)..(2): 2'-deoxy-2'Fluoro
  misc_feature (3)..(3): 2'-O-methyl
  misc_feature (4)..(4): 2'-deoxy-2'Fluoro
  misc_feature (5)..(5): 2'-O-methyl
  misc_feature (6)..(6): 2'-deoxy-2'Fluoro
  misc_feature (7)..(7): 2'-O-methyl
  misc_feature (8)..(8): 2'-deoxy-2'Fluoro
  misc_feature (9)..(19): 2'-O-methyl
  misc_feature (20)..(20): Phosphorothioate or Phosphorodithioate 3'-Internucleotide Linkage (optionally present)
  misc_feature (1). .(19): ribonucleotide unmodified or modified as described for this sequence
cuguacacaggaggaaaaatt

SEQ ID NO: 3354 - DNA, 21 bp, Artificial Sequence
  Description of Artificial Sequence: Target Sequence/siNA sense region (stab09)
  misc_feature (1)..(1): 5'-3 attached terminal deoxyabasic moiety, inverted abasic, inverted nucleotide or other terminal cap that is optionally present
  misc_feature (21)..(21): 3'-3 attached terminal deoxyabasic moiety, inverted abasic, inverted nucleotide or other terminal cap that is optionally present
  misc_feature (1). .(19): ribonucleotide unmodified or modified as described for this sequence
uuuuuccuccuguguacagtt

SEQ ID NO: 3355 - DNA, 21 bp, Artificial Sequence
  Description of Artificial Sequence: Target Sequence/siNA antisense region (stab10)
  misc_feature (20)..(20): Phosphorothioate or Phosphorodithioate 3'-Internucleotide Linkage (optionally present)
  misc_feature (1). .(19): ribonucleotide unmodified or modified as described for this sequence
cuguacacaggaggaaaaatt

SEQ ID NO: 3356 - DNA, 21 bp, Artificial Sequence
  Description of Artificial Sequence: Target Sequence/siNA antisense region (stab19)
  misc_feature (21)..(21): 3'-3 attached terminal deoxyabasic moiety, inverted abasic, inverted nucleotide or other terminal cap that is optionally present
  misc_feature (1)..(2): 2'-deoxy-2'Fluoro
  misc_feature (3)..(3): 2'-O-methyl
  misc_feature (4)..(4): 2'-deoxy-2'Fluoro
  misc_feature (5)..(5): 2'-O-methyl
  misc_feature (6)..(6): 2'-deoxy-2'Fluoro
  misc_feature (7)..(7): 2'-O-methyl
  misc_feature (8)..(8): 2'-deoxy-2'Fluoro
  misc_feature (9)..(19): 2'-O-methyl
  misc_feature (1). .(19): ribonucleotide unmodified or modified as described for this sequence
cuguacacaggaggaaaaatt

SEQ ID NO: 3357 - DNA, 21 bp, Artificial Sequence
  Description of Artificial Sequence: Target Sequence/siNA antisense region (stab22)
  misc_feature (21)..(21): 3'-3 attached terminal deoxyabasic moiety, inverted abasic, inverted nucleotide or other terminal cap that is optionally present
  misc_feature (20)..(20): Phosphorothioate or Phosphorodithioate 3'-Internucleotide Linkage (optionally present)
  misc_feature (1). .(19): ribonucleotide unmodified or modified as described for this sequence
cuguacacaggaggaaaaatt

SEQ ID NO: 3358 - DNA, 21 bp, Artificial Sequence
  Description of Artificial Sequence: Target Sequence/siNA antisense region (stab25)
  misc_feature (4)..(4): 2'-deoxy-2'Fluoro
  misc_feature (5)..(5): 2'-O-methyl
  misc_feature (6)..(6): 2'-deoxy-2'Fluoro
  misc_feature (7)..(7): 2'-O-methyl
  misc_feature (8)..(8): 2'-deoxy-2'Fluoro
  misc_feature (9)..(19): 2'-O-methyl
  misc_feature (20)..(20): Phosphorothioate or Phosphorodithioate 3'-Internucleotide Linkage (optionally present)
  misc_feature (1). .(19): ribonucleotide unmodified or modified as described for this sequence
cuguacacaggaggaaaaatt

SEQ ID NO: 3359 - RNA, 21 nt, Artificial Sequence
  Description of Artificial Sequence: Target Sequence/siNA antisense region (stab35)
  misc_feature (4)..(4): 2'-deoxy-2'Fluoro
  misc_feature (5)..(5): 2'-O-methyl
  misc_feature (6)..(6): 2'-deoxy-2'Fluoro
  misc_feature (7)..(7): 2'-O-methyl
  misc_feature (8)..(8): 2'-deoxy-2'Fluoro
  misc_feature (9)..(21): 2'-O-methyl
cuguacacaggaggaaaaauu

SEQ ID NO: 3360 - RNA, 21 nt, Artificial Sequence
  Description of Artificial Sequence: Target Sequence/siNA antisense region (stab36)
  misc_feature (4)..(4): 2'-deoxy-2'Fluoro
  misc_feature (5)..(5): 2'-O-methyl
  misc_feature (6)..(6): 2'-deoxy-2'Fluoro
  misc_feature (7)..(7): 2'-O-methyl
  misc_feature (8)..(8): 2'-deoxy-2'Fluoro
  misc_feature (9)..(21): 2'-O-methyl
cuguacacaggaggaaaaaag

SEQ ID NO: 3361 - RNA, 19 nt, Artificial Sequence
  Description of Artificial Sequence: Target Sequence/siNA sense region
gggaagagagggguacauu

SEQ ID NO: 3362 - RNA, 19 nt, Artificial Sequence
  Description of Artificial Sequence: Target Sequence/siNA antisense region
aauguaccccucucuuccc

SEQ ID NO: 3363 - DNA, 21 bp, Artificial Sequence
  Description of Artificial Sequence: Target Sequence/siNA sense region (stab00)
  misc_feature (1). .(19): ribonucleotide unmodified or modified as described for this sequence
gggaagagagggguacauutt

SEQ ID NO: 3364 - DNA, 21 bp, Artificial Sequence
  Description of Artificial Sequence: Target Sequence/siNA antisense region (stab00as)
  misc_feature (1). .(19): ribonucleotide unmodified or modified as described for this sequence
aauguaccccucucuuccctt

SEQ ID NO: 3365 - DNA, 21 bp, Artificial Sequence
  Description of Artificial Sequence: Target Sequence/siNA sense region (stab04)
  misc_feature (1)..(1): 5'-3 attached terminal deoxyabasic moiety, inverted abasic, inverted nucleotide or other terminal cap that is optionally present
  misc_feature (21)..(21): 3'-3 attached terminal deoxyabasic moiety, inverted abasic, inverted nucleotide or other terminal cap that is optionally present
  misc_feature (14)..(14): 2'-deoxy-2'Fluoro
  misc_feature (16)..(16): 2'-deoxy-2'Fluoro
  misc_feature (18)..(19): 2'-deoxy-2'Fluoro
  misc_feature (1). .(19): ribonucleotide unmodified or modified as described for this sequence
gggaagagagggguacauutt

SEQ ID NO: 3366 - DNA, 21 bp, Artificial Sequence
  Description of Artificial Sequence: Target Sequence/siNA antisense region (stab05)
  misc_feature (3)..(3): 2'-deoxy-2'Fluoro
  misc_feature (5)..(5): 2'-deoxy-2'Fluoro
  misc_feature (7)..(19): 2'-deoxy-2'Fluoro
  misc_feature (20)..(20): Phosphorothioate or Phosphorodithioate 3'-Internucleotide Linkage (optionally present)
  misc_feature (1). .(19): ribonucleotide unmodified or modified as described for this sequence
aauguaccccucucuuccctt

SEQ ID NO: 3367 - DNA, 21 bp, Artificial Sequence
  Description of Artificial Sequence: Target Sequence/siNA sense region (stab07)
  misc_feature (1)..(1): 5'-3 attached terminal deoxyabasic moiety, inverted abasic, inverted nucleotide or other terminal cap that is optionally present
  misc_feature (21)..(21): 3'-3 attached terminal deoxyabasic moiety, inverted abasic, inverted nucleotide or other terminal cap that is optionally present
  misc_feature (14)..(14): 2'-deoxy-2'Fluoro
  misc_feature (16)..(16): 2'-deoxy-2'Fluoro
  misc_feature (18)..(19): 2'-deoxy-2'Fluoro
  misc_feature (1). .(19): ribonucleotide unmodified or modified as described for this sequence
gggaagagagggguacauutt

SEQ ID NO: 3368 - DNA, 21 bp, Artificial Sequence
  Description of Artificial Sequence: Target Sequence/siNA antisense region (stab08)
  misc_feature (1)..(2): 2'-O-methyl
  misc_feature (3)..(3): 2'-deoxy-2'Fluoro
  misc_feature (4)..(4): 2'-O-methyl
  misc_feature (5)..(5): 2'-deoxy-2'Fluoro
  misc_feature (6)..(6): 2'-O-methyl
  misc_feature (7)..(19): 2'-deoxy-2'Fluoro
  misc_feature (20)..(20): Phosphorothioate or Phosphorodithioate 3'-Internucleotide Linkage (optionally present)
  misc_feature (1). .(19): ribonucleotide unmodified or modified as described for this sequence
aauguaccccucucuuccctt

SEQ ID NO: 3369 - DNA, 21 bp, Artificial Sequence
  Description of Artificial Sequence: Target Sequence/siNA sense region (stab09)
  misc_feature (1)..(1): 5'-3 attached terminal deoxyabasic moiety, inverted abasic, inverted nucleotide or other terminal cap that is optionally present
  misc_feature (21)..(21): 3'-3 attached terminal deoxyabasic moiety, inverted abasic, inverted nucleotide or other terminal cap that is optionally present
  misc_feature (1). .(19): ribonucleotide unmodified or modified as described for this sequence
gggaagagagggguacauutt

SEQ ID NO: 3370 - DNA, 21 bp, Artificial Sequence
  Description of Artificial Sequence: Target Sequence/siNA antisense region (stab10)
  misc_feature (20)..(20): Phosphorothioate or Phosphorodithioate 3'-Internucleotide Linkage (optionally present)
  misc_feature (1). .(19): ribonucleotide unmodified or modified as described for this sequence
aauguaccccucucuuccctt

SEQ ID NO: 3371 - DNA, 21 bp, Artificial Sequence
  Description of Artificial Sequence: Target Sequence/siNA antisense region (stab19)
  misc_feature (21)..(21): 3'-3 attached terminal deoxyabasic moiety, inverted abasic, inverted nucleotide or other terminal cap that is optionally present
  misc_feature (1)..(2): 2'-O-methyl
  misc_feature (3)..(3): 2'-deoxy-2'Fluoro
  misc_feature (4)..(4): 2'-O-methyl
  misc_feature (5)..(5): 2'-deoxy-2'Fluoro
  misc_feature (6)..(6): 2'-O-methyl
  misc_feature (7)..(19): 2'-deoxy-2'Fluoro
  misc_feature (1). .(19): ribonucleotide unmodified or modified as described for this sequence
aauguaccccucucuuccctt

SEQ ID NO: 3372 - DNA, 21 bp, Artificial Sequence
  Description of Artificial Sequence: Target Sequence/siNA antisense region (stab22)
  misc_feature (21)..(21): 3'-3 attached terminal deoxyabasic moiety, inverted abasic, inverted nucleotide or other terminal cap that is optionally present
  misc_feature (20)..(20): Phosphorothioate or Phosphorodithioate 3'-Internucleotide Linkage (optionally present)
  misc_feature (1). .(19): ribonucleotide unmodified or modified as described for this sequence
aauguaccccucucuuccctt

SEQ ID NO: 3373 - DNA, 21 bp, Artificial Sequence
  Description of Artificial Sequence: Target Sequence/siNA antisense region (stab25)
  misc_feature (4)..(4): 2'-O-methyl
  misc_feature (5)..(5): 2'-deoxy-2'Fluoro
  misc_feature (6)..(6): 2'-O-methyl
  misc_feature (7)..(19): 2'-deoxy-2'Fluoro
  misc_feature (20)..(20): Phosphorothioate or Phosphorodithioate 3'-Internucleotide Linkage (optionally present)
  misc_feature (1). .(19): ribonucleotide unmodified or modified as described for this sequence
aauguaccccucucuuccctt

SEQ ID NO: 3374 - RNA, 21 nt, Artificial Sequence
  Description of Artificial Sequence: Target Sequence/siNA antisense region (stab35)
  misc_feature (4)..(4): 2'-O-methyl
  misc_feature (5)..(5): 2'-deoxy-2'Fluoro
  misc_feature (6)..(6): 2'-O-methyl
  misc_feature (7)..(19): 2'-deoxy-2'Fluoro
  misc_feature (20)..(21): 2'-O-methyl
aauguaccccucucuucccuu

SEQ ID NO: 3375 - RNA, 21 nt, Artificial Sequence
  Description of Artificial Sequence: Target Sequence/siNA antisense region (stab36)
  misc_feature (4)..(4): 2'-O-methyl
  misc_feature (5)..(5): 2'-deoxy-2'Fluoro
  misc_feature (6)..(6): 2'-O-methyl
  misc_feature (7)..(19): 2'-deoxy-2'Fluoro
  misc_feature (20)..(21): 2'-O-methyl
aauguaccccucucuucccug

SEQ ID NO: 3376 - RNA, 19 nt, Artificial Sequence
  Description of Artificial Sequence: Target Sequence/siNA sense region
uucccugugcugacggaag

SEQ ID NO: 3377 - RNA, 19 nt, Artificial Sequence
  Description of Artificial Sequence: Target Sequence/siNA antisense region
cuuccgucagcacagggaa

SEQ ID NO: 3378 - DNA, 21 bp, Artificial Sequence
  Description of Artificial Sequence: Target Sequence/siNA sense region (stab00)
  misc_feature (1). .(19): ribonucleotide unmodified or modified as described for this sequence
uucccugugcugacggaagtt

SEQ ID NO: 3379 - DNA, 21 bp, Artificial Sequence
  Description of Artificial Sequence: Target Sequence/siNA antisense region (stab00as)
  misc_feature (1). .(19): ribonucleotide unmodified or modified as described for this sequence
cuuccgucagcacagggaatt

SEQ ID NO: 3380 - DNA, 21 bp, Artificial Sequence
  Description of Artificial Sequence: Target Sequence/siNA sense region (stab04)
  misc_feature (1)..(1): 5'-3 attached terminal deoxyabasic moiety, inverted abasic, inverted nucleotide or other terminal cap that is optionally present
  misc_feature (21)..(21): 3'-3 attached terminal deoxyabasic moiety, inverted abasic, inverted nucleotide or other terminal cap that is optionally present
  misc_feature (1)..(6): 2'-deoxy-2'Fluoro
  misc_feature (8)..(8): 2'-deoxy-2'Fluoro
  misc_feature (10)..(11): 2'-deoxy-2'Fluoro
  misc_feature (14)..(14): 2'-deoxy-2'Fluoro
  misc_feature (1). .(19): ribonucleotide unmodified or modified as described for this sequence
uucccugugcugacggaagtt

SEQ ID NO: 3381 - DNA, 21 bp, Artificial Sequence
  Description of Artificial Sequence: Target Sequence/siNA antisense region (stab05)
  misc_feature (1)..(5): 2'-deoxy-2'Fluoro
  misc_feature (7)..(8): 2'-deoxy-2'Fluoro
  misc_feature (11)..(11): 2'-deoxy-2'Fluoro
  misc_feature (13)..(13): 2'-deoxy-2'Fluoro
  misc_feature (20)..(20): Phosphorothioate or Phosphorodithioate 3'-Internucleotide Linkage (optionally present)
  misc_feature (1). .(19): ribonucleotide unmodified or modified as described for this sequence
cuuccgucagcacagggaatt

SEQ ID NO: 3382 - DNA, 21 bp, Artificial Sequence
  Description of Artificial Sequence: Target Sequence/siNA sense region (stab07)
  misc_feature (1)..(1): 5'-3 attached terminal deoxyabasic moiety, inverted abasic, inverted nucleotide or other terminal cap that is optionally present
  misc_feature (21)..(21): 3'-3 attached terminal deoxyabasic moiety, inverted abasic, inverted nucleotide or other terminal cap that is optionally present
  misc_feature (1)..(6): 2'-deoxy-2'Fluoro
  misc_feature (8)..(8): 2'-deoxy-2'Fluoro
  misc_feature (10)..(11): 2'-deoxy-2'Fluoro
  misc_feature (14)..(14): 2'-deoxy-2'Fluoro
  misc_feature (1). .(19): ribonucleotide unmodified or modified as described for this sequence
uucccugugcugacggaagtt

SEQ ID NO: 3383 - DNA, 21 bp, Artificial Sequence
  Description of Artificial Sequence: Target Sequence/siNA antisense region (stab08)
  misc_feature (1)..(5): 2'-deoxy-2'Fluoro
  misc_feature (6)..(6): 2'-O-methyl
  misc_feature (7)..(8): 2'-deoxy-2'Fluoro
  misc_feature (9)..(10): 2'-O-methyl
  misc_feature (11)..(11): 2'-deoxy-2'Fluoro
  misc_feature (12)..(12): 2'-O-methyl
  misc_feature (13)..(13): 2'-deoxy-2'Fluoro
  misc_feature (14)..(19): 2'-O-methyl
  misc_feature (20)..(20): Phosphorothioate or Phosphorodithioate 3'-Internucleotide Linkage (optionally present)
  misc_feature (1). .(19): ribonucleotide unmodified or modified as described for this sequence
cuuccgucagcacagggaatt

SEQ ID NO: 3384 - DNA, 21 bp, Artificial Sequence
  Description of Artificial Sequence: Target Sequence/siNA sense region (stab09)
  misc_feature (1)..(1): 5'-3 attached terminal deoxyabasic moiety, inverted abasic, inverted nucleotide or other terminal cap that is optionally present
  misc_feature (21)..(21): 3'-3 attached terminal deoxyabasic moiety, inverted abasic, inverted nucleotide or other terminal cap that is optionally present
  misc_feature (1). .(19): ribonucleotide unmodified or modified as described for this sequence
uucccugugcugacggaagtt

SEQ ID NO: 3385 - DNA, 21 bp, Artificial Sequence
  Description of Artificial Sequence: Target Sequence/siNA antisense region (stab10)
  misc_feature (20)..(20): Phosphorothioate or Phosphorodithioate 3'-Internucleotide Linkage (optionally present)
  misc_feature (1). .(19): ribonucleotide unmodified or modified as described for this sequence
cuuccgucagcacagggaatt

SEQ ID NO: 3386 - DNA, 21 bp, Artificial Sequence
  Description of Artificial Sequence: Target Sequence/siNA antisense region (stab19)
  misc_feature (21)..(21): 3'-3 attached terminal deoxyabasic moiety, inverted abasic, inverted nucleotide or other terminal cap that is optionally present
  misc_feature (1)..(5): 2'-deoxy-2'Fluoro
  misc_feature (6)..(6): 2'-O-methyl
  misc_feature (7)..(8): 2'-deoxy-2'Fluoro
  misc_feature (9)..(10): 2'-O-methyl
  misc_feature (11)..(11): 2'-deoxy-2'Fluoro
  misc_feature (12)..(12): 2'-O-methyl
  misc_feature (13)..(13): 2'-deoxy-2'Fluoro
  misc_feature (14)..(19): 2'-O-methyl
  misc_feature (1). .(19): ribonucleotide unmodified or modified as described for this sequence
cuuccgucagcacagggaatt

SEQ ID NO: 3387 - DNA, 21 bp, Artificial Sequence
  Description of Artificial Sequence: Target Sequence/siNA antisense region (stab22)
  misc_feature (21)..(21): 3'-3 attached terminal deoxyabasic moiety, inverted abasic, inverted nucleotide or other terminal cap that is optionally present
  misc_feature (20)..(20): Phosphorothioate or Phosphorodithioate 3'-Internucleotide Linkage (optionally present)
  misc_feature (1). .(19): ribonucleotide unmodified or modified as described for this sequence
cuuccgucagcacagggaatt

SEQ ID NO: 3388 - DNA, 21 bp, Artificial Sequence
  Description of Artificial Sequence: Target Sequence/siNA antisense region (stab25)
  misc_feature (4)..(5): 2'-deoxy-2'Fluoro
  misc_feature (6)..(6): 2'-O-methyl
  misc_feature (7)..(8): 2'-deoxy-2'Fluoro
  misc_feature (9)..(10): 2'-O-methyl
  misc_feature (11)..(11): 2'-deoxy-2'Fluoro
  misc_feature (12)..(12): 2'-O-methyl
  misc_feature (13)..(13): 2'-deoxy-2'Fluoro
  misc_feature (14)..(19): 2'-O-methyl
  misc_feature (20)..(20): Phosphorothioate or Phosphorodithioate 3'-Internucleotide Linkage (optionally present)
  misc_feature (1)..(3): ribonucleotide
  misc_feature (1). .(19): ribonucleotide unmodified or modified as described for this sequence
cuuccgucagcacagggaatt

SEQ ID NO: 3389 - RNA, 21 nt, Artificial Sequence
  Description of Artificial Sequence: Target Sequence/siNA antisense region (stab35)
  misc_feature (4)..(5): 2'-deoxy-2'Fluoro
  misc_feature (6)..(6): 2'-O-methyl
  misc_feature (7)..(8): 2'-deoxy-2'Fluoro
  misc_feature (9)..(10): 2'-O-methyl
  misc_feature (11)..(11): 2'-deoxy-2'Fluoro
  misc_feature (12)..(12): 2'-O-methyl
  misc_feature (13)..(13): 2'-deoxy-2'Fluoro
  misc_feature (14)..(21): 2'-O-methyl
cuuccgucagcacagggaauu

SEQ ID NO: 3390 - RNA, 21 nt, Artificial Sequence
  Description of Artificial Sequence: Target Sequence/siNA antisense region (stab36)
  misc_feature (4)..(5): 2'-deoxy-2'Fluoro
  misc_feature (6)..(6): 2'-O-methyl
  misc_feature (7)..(8): 2'-deoxy-2'Fluoro
  misc_feature (9)..(10): 2'-O-methyl
  misc_feature (11)..(11): 2'-deoxy-2'Fluoro
  misc_feature (12)..(12): 2'-O-methyl
  misc_feature (13)..(13): 2'-deoxy-2'Fluoro
  misc_feature (14)..(21): 2'-O-methyl
cuuccgucagcacagggaaau

SEQ ID NO: 3391 - RNA, 19 nt, Artificial Sequence
  Description of Artificial Sequence: Target Sequence/siNA sense region
gccaacuuggcuuucccgg

SEQ ID NO: 3392 - RNA, 19 nt, Artificial Sequence
  Description of Artificial Sequence: Target Sequence/siNA antisense region
ccgggaaagccaaguuggc

SEQ ID NO: 3393 - DNA, 21 bp, Artificial Sequence
  Description of Artificial Sequence: Target Sequence/siNA sense region (stab00)
  misc_feature (1). .(19): ribonucleotide unmodified or modified as described for this sequence
gccaacuuggcuuucccggtt

SEQ ID NO: 3394 - DNA, 21 bp, Artificial Sequence
  Description of Artificial Sequence: Target Sequence/siNA antisense region (stab00as)
  misc_feature (1). .(19): ribonucleotide unmodified or modified as described for this sequence
ccgggaaagccaaguuggctt

SEQ ID NO: 3395 - DNA, 21 bp, Artificial Sequence
  Description of Artificial Sequence: Target Sequence/siNA sense region (stab04)
  misc_feature (1)..(1): 5'-3 attached terminal deoxyabasic moiety, inverted abasic, inverted nucleotide or other terminal cap that is optionally present
  misc_feature (21)..(21): 3'-3 attached terminal deoxyabasic moiety, inverted abasic, inverted nucleotide or other terminal cap that is optionally present
  misc_feature (2)..(3): 2'-deoxy-2'Fluoro
  misc_feature (6)..(8): 2'-deoxy-2'Fluoro
  misc_feature (11)..(17): 2'-deoxy-2'Fluoro
  misc_feature (1). .(19): ribonucleotide unmodified or modified as described for this sequence
gccaacuuggcuuucccggtt

SEQ ID NO: 3396 - DNA, 21 bp, Artificial Sequence
  Description of Artificial Sequence: Target Sequence/siNA antisense region (stab05)
  misc_feature (1)..(2): 2'-deoxy-2'Fluoro
  misc_feature (10)..(11): 2'-deoxy-2'Fluoro
  misc_feature (15)..(16): 2'-deoxy-2'Fluoro
  misc_feature (19)..(19): 2'-deoxy-2'Fluoro
  misc_feature (20)..(20): Phosphorothioate or Phosphorodithioate 3'-Internucleotide Linkage (optionally present)
  misc_feature (1). .(19): ribonucleotide unmodified or modified as described for this sequence
ccgggaaagccaaguuggctt

SEQ ID NO: 3397 - DNA, 21 bp, Artificial Sequence
  Description of Artificial Sequence: Target Sequence/siNA sense region (stab07)
  misc_feature (1)..(1): 5'-3 attached terminal deoxyabasic moiety, inverted abasic, inverted nucleotide or other terminal cap that is optionally present
  misc_feature (21)..(21): 3'-3 attached terminal deoxyabasic moiety, inverted abasic, inverted nucleotide or other terminal cap that is optionally present
  misc_feature (2)..(3): 2'-deoxy-2'Fluoro
  misc_feature (6)..(8): 2'-deoxy-2'Fluoro
  misc_feature (11)..(17): 2'-deoxy-2'Fluoro
  misc_feature (1). .(19): ribonucleotide unmodified or modified as described for this sequence
gccaacuuggcuuucccggtt

SEQ ID NO: 3398 - DNA, 21 bp, Artificial Sequence
  Description of Artificial Sequence: Target Sequence/siNA antisense region (stab08)
  misc_feature (1)..(2): 2'-deoxy-2'Fluoro
  misc_feature (3)..(9): 2'-O-methyl
  misc_feature (10)..(11): 2'-deoxy-2'Fluoro
  misc_feature (12)..(14): 2'-O-methyl
  misc_feature (15)..(16): 2'-deoxy-2'Fluoro
  misc_feature (17)..(18): 2'-O-methyl
  misc_feature (19)..(19): 2'-deoxy-2'Fluoro
  misc_feature (20)..(20): Phosphorothioate or Phosphorodithioate 3'-Internucleotide Linkage (optionally present)
  misc_feature (1). .(19): ribonucleotide unmodified or modified as described for this sequence
ccgggaaagccaaguuggctt

SEQ ID NO: 3399 - DNA, 21 bp, Artificial Sequence
  Description of Artificial Sequence: Target Sequence/siNA sense region (stab09)
  misc_feature (1)..(1): 5'-3 attached terminal deoxyabasic moiety, inverted abasic, inverted nucleotide or other terminal cap that is optionally present
  misc_feature (21)..(21): 3'-3 attached terminal deoxyabasic moiety, inverted abasic, inverted nucleotide or other terminal cap that is optionally present
  misc_feature (1). .(19): ribonucleotide unmodified or modified as described for this sequence
gccaacuuggcuuucccggtt

SEQ ID NO: 3400 - DNA, 21 bp, Artificial Sequence
  Description of Artificial Sequence: Target Sequence/siNA antisense region (stab10)
  misc_feature (20)..(20): Phosphorothioate or Phosphorodithioate 3'-Internucleotide Linkage (optionally present)
  misc_feature (1). .(19): ribonucleotide unmodified or modified as described for this sequence
ccgggaaagccaaguuggctt

SEQ ID NO: 3401 - DNA, 21 bp, Artificial Sequence
  Description of Artificial Sequence: Target Sequence/siNA antisense region (stab19)
  misc_feature (21)..(21): 3'-3 attached terminal deoxyabasic moiety, inverted abasic, inverted nucleotide or other terminal cap that is optionally present
  misc_feature (1)..(2): 2'-deoxy-2'Fluoro
  misc_feature (3)..(9): 2'-O-methyl
  misc_feature (10)..(11): 2'-deoxy-2'Fluoro
  misc_feature (12)..(14): 2'-O-methyl
  misc_feature (15)..(16): 2'-deoxy-2'Fluoro
  misc_feature (17)..(18): 2'-O-methyl
  misc_feature (19)..(19): 2'-deoxy-2'Fluoro
  misc_feature (1). .(19): ribonucleotide unmodified or modified as described for this sequence
ccgggaaagccaaguuggctt

SEQ ID NO: 3402 - DNA, 21 bp, Artificial Sequence
  Description of Artificial Sequence: Target Sequence/siNA antisense region (stab22)
  misc_feature (21)..(21): 3'-3 attached terminal deoxyabasic moiety, inverted abasic, inverted nucleotide or other terminal cap that is optionally present
  misc_feature (20)..(20): Phosphorothioate or Phosphorodithioate 3'-Internucleotide Linkage (optionally present)
  misc_feature (1). .(19): ribonucleotide unmodified or modified as described for this sequence
ccgggaaagccaaguuggctt

SEQ ID NO: 3403 - DNA, 21 bp, Artificial Sequence
  Description of Artificial Sequence: Target Sequence/siNA antisense region (stab25)
  misc_feature (4)..(9): 2'-O-methyl
  misc_feature (10)..(11): 2'-deoxy-2'Fluoro
  misc_feature (12)..(14): 2'-O-methyl
  misc_feature (15)..(16): 2'-deoxy-2'Fluoro
  misc_feature (17)..(18): 2'-O-methyl
  misc_feature (19)..(19): 2'-deoxy-2'Fluoro
  misc_feature (20)..(20): Phosphorothioate or Phosphorodithioate 3'-Internucleotide Linkage (optionally present)
  misc_feature (1). .(19): ribonucleotide unmodified or modified as described for this sequence
ccgggaaagccaaguuggctt

SEQ ID NO: 3404 - RNA, 21 nt, Artificial Sequence
  Description of Artificial Sequence: Target Sequence/siNA antisense region (stab35)
  misc_feature (4)..(9): 2'-O-methyl
  misc_feature (10)..(11): 2'-deoxy-2'Fluoro
  misc_feature (12)..(14): 2'-O-methyl
  misc_feature (15)..(16): 2'-deoxy-2'Fluoro
  misc_feature (17)..(18): 2'-O-methyl
  misc_feature (19)..(19): 2'-deoxy-2'Fluoro
  misc_feature (20)..(21): 2'-O-methyl
ccgggaaagccaaguuggcuu

SEQ ID NO: 3405 - RNA, 21 nt, Artificial Sequence
  Description of Artificial Sequence: Target Sequence/siNA antisense region (stab36)
  misc_feature (4)..(9): 2'-O-methyl
  misc_feature (10)..(11): 2'-deoxy-2'Fluoro
  misc_feature (12)..(14): 2'-O-methyl
  misc_feature (15)..(16): 2'-deoxy-2'Fluoro
  misc_feature (17)..(18): 2'-O-methyl
  misc_feature (19)..(19): 2'-deoxy-2'Fluoro
  misc_feature (20)..(21): 2'-O-methyl
ccgggaaagccaaguuggcuu

SEQ ID NO: 3406 - RNA, 19 nt, Artificial Sequence
  Description of Artificial Sequence: Target Sequence/siNA sense region
gacugcaagcagggcucug

SEQ ID NO: 3407 - RNA, 19 nt, Artificial Sequence
  Description of Artificial Sequence: Target Sequence/siNA antisense region
cagagcccugcuugcaguc

SEQ ID NO: 3408 - DNA, 21 bp, Artificial Sequence
  Description of Artificial Sequence: Target Sequence/siNA sense region (stab00)
  misc_feature (1). .(19): ribonucleotide unmodified or modified as described for this sequence
gacugcaagcagggcucugtt

SEQ ID NO: 3409 - DNA, 21 bp, Artificial Sequence
  Description of Artificial Sequence: Target Sequence/siNA antisense region (stab00as)
  misc_feature (1). .(19): ribonucleotide unmodified or modified as described for this sequence
cagagcccugcuugcaguctt

SEQ ID NO: 3410 - DNA, 21 bp, Artificial Sequence
  Description of Artificial Sequence: Target Sequence/siNA sense region (stab04)
  misc_feature (1)..(1): 5'-3 attached terminal deoxyabasic moiety, inverted abasic, inverted nucleotide or other terminal cap that is optionally present
  misc_feature (21)..(21): 3'-3 attached terminal deoxyabasic moiety, inverted abasic, inverted nucleotide or other terminal cap that is optionally present
  misc_feature (3)..(4): 2'-deoxy-2'Fluoro
  misc_feature (6)..(6): 2'-deoxy-2'Fluoro
  misc_feature (10)..(10): 2'-deoxy-2'Fluoro
  misc_feature (15)..(18): 2'-deoxy-2'Fluoro
  misc_feature (1). .(19): ribonucleotide unmodified or modified as described for this sequence
gacugcaagcagggcucugtt

SEQ ID NO: 3411 - DNA, 21 bp, Artificial Sequence
  Description of Artificial Sequence: Target Sequence/siNA antisense region (stab05)
  misc_feature (1)..(1): 2'-deoxy-2'Fluoro
  misc_feature (6)..(9): 2'-deoxy-2'Fluoro
  misc_feature (11)..(13): 2'-deoxy-2'Fluoro
  misc_feature (15)..(15): 2'-deoxy-2'Fluoro
  misc_feature (18)..(19): 2'-deoxy-2'Fluoro
  misc_feature (20)..(20): Phosphorothioate or Phosphorodithioate 3'-Internucleotide Linkage (optionally present)
  misc_feature (1). .(19): ribonucleotide unmodified or modified as described for this sequence
cagagcccugcuugcaguctt

SEQ ID NO: 3412 - DNA, 21 bp, Artificial Sequence
  Description of Artificial Sequence: Target Sequence/siNA sense region (stab07)
  misc_feature (1)..(1): 5'-3 attached terminal deoxyabasic moiety, inverted abasic, inverted nucleotide or other terminal cap that is optionally present
  misc_feature (21)..(21): 3'-3 attached terminal deoxyabasic moiety, inverted abasic, inverted nucleotide or other terminal cap that is optionally present
  misc_feature (3)..(4): 2'-deoxy-2'Fluoro
  misc_feature (6)..(6): 2'-deoxy-2'Fluoro
  misc_feature (10)..(10): 2'-deoxy-2'Fluoro
  misc_feature (15)..(18): 2'-deoxy-2'Fluoro
  misc_feature (1). .(19): ribonucleotide unmodified or modified as described for this sequence
gacugcaagcagggcucugtt

SEQ ID NO: 3413 - DNA, 21 bp, Artificial Sequence
  Description of Artificial Sequence: Target Sequence/siNA antisense region (stab08)
  misc_feature (1)..(1): 2'-deoxy-2'Fluoro
  misc_feature (2)..(5): 2'-O-methyl
  misc_feature (6)..(9): 2'-deoxy-2'Fluoro
  misc_feature (10)..(10): 2'-O-methyl
  misc_feature (11)..(13): 2'-deoxy-2'Fluoro
  misc_feature (14)..(14): 2'-O-methyl
  misc_feature (15)..(15): 2'-deoxy-2'Fluoro
  misc_feature (16)..(17): 2'-O-methyl
  misc_feature (18)..(19): 2'-deoxy-2'Fluoro
  misc_feature (20)..(20): Phosphorothioate or Phosphorodithioate 3'-Internucleotide Linkage (optionally present)
  misc_feature (1). .(19): ribonucleotide unmodified or modified as described for this sequence
cagagcccugcuugcaguctt

SEQ ID NO: 3414 - DNA, 21 bp, Artificial Sequence
  Description of Artificial Sequence: Target Sequence/siNA sense region (stab09)
  misc_feature (1)..(1): 5'-3 attached terminal deoxyabasic moiety, inverted abasic, inverted nucleotide or other terminal cap that is optionally present
  misc_feature (21)..(21): 3'-3 attached terminal deoxyabasic moiety, inverted abasic, inverted nucleotide or other terminal cap that is optionally present
  misc_feature (1). .(19): ribonucleotide unmodified or modified as described for this sequence
gacugcaagcagggcucugtt

SEQ ID NO: 3415 - DNA, 21 bp, Artificial Sequence
  Description of Artificial Sequence: Target Sequence/siNA antisense region (stab10)
  misc_feature (20)..(20): Phosphorothioate or Phosphorodithioate 3'-Internucleotide Linkage (optionally present)
  misc_feature (1). .(19): ribonucleotide unmodified or modified as described for this sequence
cagagcccugcuugcaguctt

SEQ ID NO: 3416 - DNA, 21 bp, Artificial Sequence
  Description of Artificial Sequence: Target Sequence/siNA antisense region (stab19)
  misc_feature (21)..(21): 3'-3 attached terminal deoxyabasic moiety, inverted abasic, inverted nucleotide or other terminal cap that is optionally present
  misc_feature (1)..(1): 2'-deoxy-2'Fluoro
  misc_feature (2)..(5): 2'-O-methyl
  misc_feature (6)..(9): 2'-deoxy-2'Fluoro
  misc_feature (10)..(10): 2'-O-methyl
  misc_feature (11)..(13): 2'-deoxy-2'Fluoro
  misc_feature (14)..(14): 2'-O-methyl
  misc_feature (15)..(15): 2'-deoxy-2'Fluoro
  misc_feature (16)..(17): 2'-O-methyl
  misc_feature (18)..(19): 2'-deoxy-2'Fluoro
  misc_feature (1). .(19): ribonucleotide unmodified or modified as described for this sequence
cagagcccugcuugcaguctt

SEQ ID NO: 3417 - DNA, 21 bp, Artificial Sequence
  Description of Artificial Sequence: Target Sequence/siNA antisense region (stab22)
  misc_feature (21)..(21): 3'-3 attached terminal deoxyabasic moiety, inverted abasic, inverted nucleotide or other terminal cap that is optionally present
  misc_feature (20)..(20): Phosphorothioate or Phosphorodithioate 3'-Internucleotide Linkage (optionally present)
  misc_feature (1). .(19): ribonucleotide unmodified or modified as described for this sequence
cagagcccugcuugcaguctt

SEQ ID NO: 3418 - DNA, 21 bp, Artificial Sequence
  Description of Artificial Sequence: Target Sequence/siNA antisense region (stab25)
  misc_feature (4)..(5): 2'-O-methyl
  misc_feature (6)..(9): 2'-deoxy-2'Fluoro
  misc_feature (10)..(10): 2'-O-methyl
  misc_feature (11)..(13): 2'-deoxy-2'Fluoro
  misc_feature (14)..(14): 2'-O-methyl
  misc_feature (15)..(15): 2'-deoxy-2'Fluoro
  misc_feature (16)..(17): 2'-O-methyl
  misc_feature (18)..(19): 2'-deoxy-2'Fluoro
  misc_feature (20)..(20): Phosphorothioate or Phosphorodithioate 3'-Internucleotide Linkage (optionally present)
  misc_feature (1). .(19): ribonucleotide unmodified or modified as described for this sequence
cagagcccugcuugcaguctt

SEQ ID NO: 3419 - RNA, 21 nt, Artificial Sequence
  Description of Artificial Sequence: Target Sequence/siNA antisense region (stab35)
  misc_feature (4)..(5): 2'-O-methyl
  misc_feature (6)..(9): 2'-deoxy-2'Fluoro
  misc_feature (10)..(10): 2'-O-methyl
  misc_feature (11)..(13): 2'-deoxy-2'Fluoro
  misc_feature (14)..(14): 2'-O-methyl
  misc_feature (15)..(15): 2'-deoxy-2'Fluoro
  misc_feature (16)..(17): 2'-O-methyl
  misc_feature (18)..(19): 2'-deoxy-2'Fluoro
  misc_feature (20)..(21): 2'-O-methyl
cagagcccugcuugcagucuu

SEQ ID NO: 3420 - RNA, 21 nt, Artificial Sequence
  Description of Artificial Sequence: Target Sequence/siNA antisense region (stab36)
  misc_feature (4)..(5): 2'-O-methyl
  misc_feature (6)..(9): 2'-deoxy-2'Fluoro
  misc_feature (10)..(10): 2'-O-methyl
  misc_feature (11)..(13): 2'-deoxy-2'Fluoro
  misc_feature (14)..(14): 2'-O-methyl
  misc_feature (15)..(15): 2'-deoxy-2'Fluoro
  misc_feature (16)..(17): 2'-O-methyl
  misc_feature (18)..(19): 2'-deoxy-2'Fluoro
  misc_feature (20)..(21): 2'-O-methyl
cagagcccugcuugcaguccg

SEQ ID NO: 3421 - RNA, 19 nt, Artificial Sequence
  Description of Artificial Sequence: Target Sequence/siNA sense region
gccccagaggccucucucu

SEQ ID NO: 3422 - RNA, 19 nt, Artificial Sequence
  Description of Artificial Sequence: Target Sequence/siNA antisense region
agagagaggccucuggggc

SEQ ID NO: 3423 - DNA, 21 bp, Artificial Sequence
  Description of Artificial Sequence: Target Sequence/siNA sense region (stab00)
  misc_feature (1). .(19): ribonucleotide unmodified or modified as described for this sequence
gccccagaggccucucucutt

SEQ ID NO: 3424 - DNA, 21 bp, Artificial Sequence
  Description of Artificial Sequence: Target Sequence/siNA antisense region (stab00as)
  misc_feature (1). .(19): ribonucleotide unmodified or modified as described for this sequence
agagagaggccucuggggctt

SEQ ID NO: 3425 - DNA, 21 bp, Artificial Sequence
  Description of Artificial Sequence: Target Sequence/siNA sense region (stab04)
  misc_feature (1)..(1): 5'-3 attached terminal deoxyabasic moiety, inverted abasic, inverted nucleotide or other terminal cap that is optionally present
  misc_feature (21)..(21): 3'-3 attached terminal deoxyabasic moiety, inverted abasic, inverted nucleotide or other terminal cap that is optionally present
  misc_feature (2)..(5): 2'-deoxy-2'Fluoro
  misc_feature (11)..(19): 2'-deoxy-2'Fluoro
  misc_feature (1). .(19): ribonucleotide unmodified or modified as described for this sequence
gccccagaggccucucucutt

SEQ ID NO: 3426 - DNA, 21 bp, Artificial Sequence
  Description of Artificial Sequence: Target Sequence/siNA antisense region (stab05)
  misc_feature (10)..(14): 2'-deoxy-2'Fluoro
  misc_feature (19)..(19): 2'-deoxy-2'Fluoro
  misc_feature (20)..(20): Phosphorothioate or Phosphorodithioate 3'-Internucleotide Linkage (optionally present)
  misc_feature (1). .(19): ribonucleotide unmodified or modified as described for this sequence
agagagaggccucuggggctt

SEQ ID NO: 3427 - DNA, 21 bp, Artificial Sequence
  Description of Artificial Sequence: Target Sequence/siNA sense region (stab07)
  misc_feature (1)..(1): 5'-3 attached terminal deoxyabasic moiety, inverted abasic, inverted nucleotide or other terminal cap that is optionally present
  misc_feature (21)..(21): 3'-3 attached terminal deoxyabasic moiety, inverted abasic, inverted nucleotide or other terminal cap that is optionally present
  misc_feature (2)..(5): 2'-deoxy-2'Fluoro
  misc_feature (11)..(19): 2'-deoxy-2'Fluoro
  misc_feature (1). .(19): ribonucleotide unmodified or modified as described for this sequence
gccccagaggccucucucutt

SEQ ID NO: 3428 - DNA, 21 bp, Artificial Sequence
  Description of Artificial Sequence: Target Sequence/siNA antisense region (stab08)
  misc_feature (1)..(9): 2'-O-methyl
  misc_feature (10)..(14): 2'-deoxy-2'Fluoro
  misc_feature (15)..(18): 2'-O-methyl
  misc_feature (19)..(19): 2'-deoxy-2'Fluoro
  misc_feature (20)..(20): Phosphorothioate or Phosphorodithioate 3'-Internucleotide Linkage (optionally present)
  misc_feature (1). .(19): ribonucleotide unmodified or modified as described for this sequence
agagagaggccucuggggctt

SEQ ID NO: 3429 - DNA, 21 bp, Artificial Sequence
  Description of Artificial Sequence: Target Sequence/siNA sense region (stab09)
  misc_feature (1)..(1): 5'-3 attached terminal deoxyabasic moiety, inverted abasic, inverted nucleotide or other terminal cap that is optionally present
  misc_feature (21)..(21): 3'-3 attached terminal deoxyabasic moiety, inverted abasic, inverted nucleotide or other terminal cap that is optionally present
  misc_feature (1). .(19): ribonucleotide unmodified or modified as described for this sequence
gccccagaggccucucucutt

SEQ ID NO: 3430 - DNA, 21 bp, Artificial Sequence
  Description of Artificial Sequence: Target Sequence/siNA antisense region (stab10)
  misc_feature (20)..(20): Phosphorothioate or Phosphorodithioate 3'-Internucleotide Linkage (optionally present)
  misc_feature (1). .(19): ribonucleotide unmodified or modified as described for this sequence
agagagaggccucuggggctt

SEQ ID NO: 3431 - DNA, 21 bp, Artificial Sequence
  Description of Artificial Sequence: Target Sequence/siNA antisense region (stab19)
  misc_feature (21)..(21): 3'-3 attached terminal deoxyabasic moiety, inverted abasic, inverted nucleotide or other terminal cap that is optionally present
  misc_feature (1)..(9): 2'-O-methyl
  misc_feature (10)..(14): 2'-deoxy-2'Fluoro
  misc_feature (15)..(18): 2'-O-methyl
  misc_feature (19)..(19): 2'-deoxy-2'Fluoro
  misc_feature (1). .(19): ribonucleotide unmodified or modified as described for this sequence
agagagaggccucuggggctt

SEQ ID NO: 3432 - DNA, 21 bp, Artificial Sequence
  Description of Artificial Sequence: Target Sequence/siNA antisense region (stab22)
  misc_feature (21)..(21): 3'-3 attached terminal deoxyabasic moiety, inverted abasic, inverted nucleotide or other terminal cap that is optionally present
  misc_feature (20)..(20): Phosphorothioate or Phosphorodithioate 3'-Internucleotide Linkage (optionally present)
  misc_feature (1). .(19): ribonucleotide unmodified or modified as described for this sequence
agagagaggccucuggggctt

SEQ ID NO: 3433 - DNA, 21 bp, Artificial Sequence
  Description of Artificial Sequence: Target Sequence/siNA antisense region (stab25)
  misc_feature (4)..(9): 2'-O-methyl
  misc_feature (10)..(14): 2'-deoxy-2'Fluoro
  misc_feature (15)..(18): 2'-O-methyl
  misc_feature (19)..(19): 2'-deoxy-2'Fluoro
  misc_feature (20)..(20): Phosphorothioate or Phosphorodithioate 3'-Internucleotide Linkage (optionally present)
  misc_feature (1). .(19): ribonucleotide unmodified or modified as described for this sequence
agagagaggccucuggggctt

SEQ ID NO: 3434 - RNA, 21 nt, Artificial Sequence
  Description of Artificial Sequence: Target Sequence/siNA antisense region (stab35)
  misc_feature (4)..(9): 2'-O-methyl
  misc_feature (10)..(14): 2'-deoxy-2'Fluoro
  misc_feature (15)..(18): 2'-O-methyl
  misc_feature (19)..(19): 2'-deoxy-2'Fluoro
  misc_feature (20)..(21): 2'-O-methyl
agagagaggccucuggggcuu

SEQ ID NO: 3435 - RNA, 21 nt, Artificial Sequence
  Description of Artificial Sequence: Target Sequence/siNA antisense region (stab36)
  misc_feature (4)..(9): 2'-O-methyl
  misc_feature (10)..(14): 2'-deoxy-2'Fluoro
  misc_feature (15)..(18): 2'-O-methyl
  misc_feature (19)..(19): 2'-deoxy-2'Fluoro
  misc_feature (20)..(21): 2'-O-methyl
agagagaggccucuggggcag

SEQ ID NO: 3436 - RNA, 19 nt, Artificial Sequence
  Description of Artificial Sequence: Target Sequence/siNA sense region
uccgucgugggagagagac

SEQ ID NO: 3437 - RNA, 19 nt, Artificial Sequence
  Description of Artificial Sequence: Target Sequence/siNA antisense region
gucucucucccacgacgga

SEQ ID NO: 3438 - DNA, 21 bp, Artificial Sequence
  Description of Artificial Sequence: Target Sequence/siNA sense region (stab00)
  misc_feature (1). .(19): ribonucleotide unmodified or modified as described for this sequence
uccgucgugggagagagactt

SEQ ID NO: 3439 - DNA, 21 bp, Artificial Sequence
  Description of Artificial Sequence: Target Sequence/siNA antisense region (stab00as)
  misc_feature (1). .(19): ribonucleotide unmodified or modified as described for this sequence
gucucucucccacgacggatt

SEQ ID NO: 3440 - DNA, 21 bp, Artificial Sequence
  Description of Artificial Sequence: Target Sequence/siNA sense region (stab04)
  misc_feature (1)..(1): 5'-3 attached terminal deoxyabasic moiety, inverted abasic, inverted nucleotide or other terminal cap that is optionally present
  misc_feature (21)..(21): 3'-3 attached terminal deoxyabasic moiety, inverted abasic, inverted nucleotide or other terminal cap that is optionally present
  misc_feature (1)..(3): 2'-deoxy-2'Fluoro
  misc_feature (5)..(6): 2'-deoxy-2'Fluoro
  misc_feature (8)..(8): 2'-deoxy-2'Fluoro
  misc_feature (19)..(19): 2'-deoxy-2'Fluoro
  misc_feature (1). .(19): ribonucleotide unmodified or modified as described for this sequence
uccgucgugggagagagactt

SEQ ID NO: 3441 - DNA, 21 bp, Artificial Sequence
  Description of Artificial Sequence: Target Sequence/siNA antisense region (stab05)
  misc_feature (2)..(11): 2'-deoxy-2'Fluoro
  misc_feature (13)..(13): 2'-deoxy-2'Fluoro
  misc_feature (16)..(16): 2'-deoxy-2'Fluoro
  misc_feature (20)..(20): Phosphorothioate or Phosphorodithioate 3'-Internucleotide Linkage (optionally present)
  misc_feature (1). .(19): ribonucleotide unmodified or modified as described for this sequence
gucucucucccacgacggatt

SEQ ID NO: 3442 - DNA, 21 bp, Artificial Sequence
  Description of Artificial Sequence: Target Sequence/siNA sense region (stab07)
  misc_feature (1)..(1): 5'-3 attached terminal deoxyabasic moiety, inverted abasic, inverted nucleotide or other terminal cap that is optionally present
  misc_feature (21)..(21): 3'-3 attached terminal deoxyabasic moiety, inverted abasic, inverted nucleotide or other terminal cap that is optionally present
  misc_feature (1)..(3): 2'-deoxy-2'Fluoro
  misc_feature (5)..(6): 2'-deoxy-2'Fluoro
  misc_feature (8)..(8): 2'-deoxy-2'Fluoro
  misc_feature (19)..(19): 2'-deoxy-2'Fluoro
  misc_feature (1). .(19): ribonucleotide unmodified or modified as described for this sequence
uccgucgugggagagagactt

SEQ ID NO: 3443 - DNA, 21 bp, Artificial Sequence
  Description of Artificial Sequence: Target Sequence/siNA antisense region (stab08)
  misc_feature (1)..(1): 2'-O-methyl
  misc_feature (2)..(11): 2'-deoxy-2'Fluoro
  misc_feature (12)..(12): 2'-O-methyl
  misc_feature (13)..(13): 2'-deoxy-2'Fluoro
  misc_feature (14)..(15): 2'-O-methyl
  misc_feature (16)..(16): 2'-deoxy-2'Fluoro
  misc_feature (17)..(19): 2'-O-methyl
  misc_feature (20)..(20): Phosphorothioate or Phosphorodithioate 3'-Internucleotide Linkage (optionally present)
  misc_feature (1). .(19): ribonucleotide unmodified or modified as described for this sequence
gucucucucccacgacggatt

SEQ ID NO: 3444 - DNA, 21 bp, Artificial Sequence
  Description of Artificial Sequence: Target Sequence/siNA sense region (stab09)
  misc_feature (1)..(1): 5'-3 attached terminal deoxyabasic moiety, inverted abasic, inverted nucleotide or other terminal cap that is optionally present
  misc_feature (21)..(21): 3'-3 attached terminal deoxyabasic moiety, inverted abasic, inverted nucleotide or other terminal cap that is optionally present
  misc_feature (1). .(19): ribonucleotide unmodified or modified as described for this sequence
uccgucgugggagagagactt

SEQ ID NO: 3445 - DNA, 21 bp, Artificial Sequence
  Description of Artificial Sequence: Target Sequence/siNA antisense region (stab10)
  misc_feature (20)..(20): Phosphorothioate or Phosphorodithioate 3'-Internucleotide Linkage (optionally present)
  misc_feature (1). .(19): ribonucleotide unmodified or modified as described for this sequence
gucucucucccacgacggatt

SEQ ID NO: 3446 - DNA, 21 bp, Artificial Sequence
  Description of Artificial Sequence: Target Sequence/siNA antisense region (stab19)
  misc_feature (21)..(21): 3'-3 attached terminal deoxyabasic moiety, inverted abasic, inverted nucleotide or other terminal cap that is optionally present
  misc_feature (1)..(1): 2'-O-methyl
  misc_feature (2)..(11): 2'-deoxy-2'Fluoro
  misc_feature (12)..(12): 2'-O-methyl
  misc_feature (13)..(13): 2'-deoxy-2'Fluoro
  misc_feature (14)..(15): 2'-O-methyl
  misc_feature (16)..(16): 2'-deoxy-2'Fluoro
  misc_feature (17)..(19): 2'-O-methyl
  misc_feature (1). .(19): ribonucleotide unmodified or modified as described for this sequence
gucucucucccacgacggatt

SEQ ID NO: 3447 - DNA, 21 bp, Artificial Sequence
  Description of Artificial Sequence: Target Sequence/siNA antisense region (stab22)
  misc_feature (21)..(21): 3'-3 attached terminal deoxyabasic moiety, inverted abasic, inverted nucleotide or other terminal cap that is optionally present
  misc_feature (20)..(20): Phosphorothioate or Phosphorodithioate 3'-Internucleotide Linkage (optionally present)
  misc_feature (1). .(19): ribonucleotide unmodified or modified as described for this sequence
gucucucucccacgacggatt

SEQ ID NO: 3448 - DNA, 21 bp, Artificial Sequence
  Description of Artificial Sequence: Target Sequence/siNA antisense region (stab25)
  misc_feature (4)..(11): 2'-deoxy-2'Fluoro
  misc_feature (12)..(12): 2'-O-methyl
  misc_feature (13)..(13): 2'-deoxy-2'Fluoro
  misc_feature (14)..(15): 2'-O-methyl
  misc_feature (16)..(16): 2'-deoxy-2'Fluoro
  misc_feature (17)..(19): 2'-O-methyl
  misc_feature (20)..(20): Phosphorothioate or Phosphorodithioate 3'-Internucleotide Linkage (optionally present)
  misc_feature (1). .(19): ribonucleotide unmodified or modified as described for this sequence
gucucucucccacgacggatt

SEQ ID NO: 3449 - RNA, 21 nt, Artificial Sequence
  Description of Artificial Sequence: Target Sequence/siNA antisense region (stab35)
  misc_feature (4)..(11): 2'-deoxy-2'Fluoro
  misc_feature (12)..(12): 2'-O-methyl
  misc_feature (13)..(13): 2'-deoxy-2'Fluoro
  misc_feature (14)..(15): 2'-O-methyl
  misc_feature (16)..(16): 2'-deoxy-2'Fluoro
  misc_feature (17)..(21): 2'-O-methyl
  misc_feature (1). .(19): ribonucleotide unmodified or modified as described for this sequence
gucucucucccacgacggauu

SEQ ID NO: 3450 - RNA, 21 nt, Artificial Sequence
  Description of Artificial Sequence: Target Sequence/siNA antisense region (stab36)
  misc_feature (4)..(11): 2'-deoxy-2'Fluoro
  misc_feature (12)..(12): 2'-O-methyl
  misc_feature (13)..(13): 2'-deoxy-2'Fluoro
  misc_feature (14)..(15): 2'-O-methyl
  misc_feature (16)..(16): 2'-deoxy-2'Fluoro
  misc_feature (17)..(21): 2'-O-methyl
  misc_feature (1). .(19): ribonucleotide unmodified or modified as described for this sequence
gucucucucccacgacggaga

SEQ ID NO: 3451 - RNA, 19 nt, Artificial Sequence
  Description of Artificial Sequence: Target Sequence/siNA sense region
cguguacauaguguagguc

SEQ ID NO: 3452 - RNA, 19 nt, Artificial Sequence
  Description of Artificial Sequence: Target Sequence/siNA antisense region
gaccuacacuauguacacg

SEQ ID NO: 3453 - DNA, 21 bp, Artificial Sequence
  Description of Artificial Sequence: Target Sequence/siNA sense region (stab00)
  misc_feature (1). .(19): ribonucleotide unmodified or modified as described for this sequence
cguguacauaguguagguctt

SEQ ID NO: 3454 - DNA, 21 bp, Artificial Sequence
  Description of Artificial Sequence: Target Sequence/siNA antisense region (stab00as)
  misc_feature (1). .(19): ribonucleotide unmodified or modified as described for this sequence
gaccuacacuauguacacgtt

SEQ ID NO: 3455 - DNA, 21 bp, Artificial Sequence
  Description of Artificial Sequence: Target Sequence/siNA sense region (stab04)
  misc_feature (1)..(1): 5'-3 attached terminal deoxyabasic moiety, inverted abasic, inverted nucleotide or other terminal cap that is optionally present
  misc_feature (21)..(21): 3'-3 attached terminal deoxyabasic moiety, inverted abasic, inverted nucleotide or other terminal cap that is optionally present
  misc_feature (1)..(1): 2'-deoxy-2'Fluoro
  misc_feature (3)..(3): 2'-deoxy-2'Fluoro
  misc_feature (5)..(5): 2'-deoxy-2'Fluoro
  misc_feature (7)..(7): 2'-deoxy-2'Fluoro
  misc_feature (9)..(9): 2'-deoxy-2'Fluoro
  misc_feature (12)..(12): 2'-deoxy-2'Fluoro
  misc_feature (14)..(14): 2'-deoxy-2'Fluoro
  misc_feature (18)..(19): 2'-deoxy-2'Fluoro
  misc_feature (1). .(19): ribonucleotide unmodified or modified as described for this sequence
cguguacauaguguagguctt

SEQ ID NO: 3456 - DNA, 21 bp, Artificial Sequence
  Description of Artificial Sequence: Target Sequence/siNA antisense region (stab05)
  misc_feature (3)..(5): 2'-deoxy-2'Fluoro
  misc_feature (7)..(7): 2'-deoxy-2'Fluoro
  misc_feature (9)..(10): 2'-deoxy-2'Fluoro
  misc_feature (12)..(12): 2'-deoxy-2'Fluoro
  misc_feature (14)..(14): 2'-deoxy-2'Fluoro
  misc_feature (16)..(16): 2'-deoxy-2'Fluoro
  misc_feature (18)..(18): 2'-deoxy-2'Fluoro
  misc_feature (20)..(20): Phosphorothioate or Phosphorodithioate 3'-Internucleotide Linkage (optionally present)
  misc_feature (1). .(19): ribonucleotide unmodified or modified as described for this sequence
gaccuacacuauguacacgtt

SEQ ID NO: 3457 - DNA, 21 bp, Artificial Sequence
  Description of Artificial Sequence: Target Sequence/siNA sense region (stab07)
  misc_feature (1)..(1): 5'-3 attached terminal deoxyabasic moiety, inverted abasic, inverted nucleotide or other terminal cap that is optionally present
  misc_feature (21)..(21): 3'-3 attached terminal deoxyabasic moiety, inverted abasic, inverted nucleotide or other terminal cap that is optionally present
  misc_feature (1)..(1): 2'-deoxy-2'Fluoro
  misc_feature (3)..(3): 2'-deoxy-2'Fluoro
  misc_feature (5)..(5): 2'-deoxy-2'Fluoro
  misc_feature (7)..(7): 2'-deoxy-2'Fluoro
  misc_feature (9)..(9): 2'-deoxy-2'Fluoro
  misc_feature (12)..(12): 2'-deoxy-2'Fluoro
  misc_feature (14)..(14): 2'-deoxy-2'Fluoro
  misc_feature (18)..(19): 2'-deoxy-2'Fluoro
  misc_feature (1). .(19): ribonucleotide unmodified or modified as described for this sequence
cguguacauaguguagguctt

SEQ ID NO: 3458 - DNA, 21 bp, Artificial Sequence
  Description of Artificial Sequence: Target Sequence/siNA antisense region (stab08)
  misc_feature (1)..(2): 2'-O-methyl
  misc_feature (3)..(5): 2'-deoxy-2'Fluoro
  misc_feature (6)..(6): 2'-O-methyl
  misc_feature (7)..(7): 2'-deoxy-2'Fluoro
  misc_feature (8)..(8): 2'-O-methyl
  misc_feature (9)..(10): 2'-deoxy-2'Fluoro
  misc_feature (11)..(11): 2'-O-methyl
  misc_feature (12)..(12): 2'-deoxy-2'Fluoro
  misc_feature (13)..(13): 2'-O-methyl
  misc_feature (14)..(14): 2'-deoxy-2'Fluoro
  misc_feature (15)..(15): 2'-O-methyl
  misc_feature (16)..(16): 2'-deoxy-2'Fluoro
  misc_feature (17)..(17): 2'-O-methyl
  misc_feature (18)..(18): 2'-deoxy-2'Fluoro
  misc_feature (19)..(19): 2'-O-methyl
  misc_feature (20)..(20): Phosphorothioate or Phosphorodithioate 3'-Internucleotide Linkage (optionally present)
  misc_feature (1). .(19): ribonucleotide unmodified or modified as described for this sequence
gaccuacacuauguacacgtt

SEQ ID NO: 3459 - DNA, 21 bp, Artificial Sequence
  Description of Artificial Sequence: Target Sequence/siNA sense region (stab09)
  misc_feature (1)..(1): 5'-3 attached terminal deoxyabasic moiety, inverted abasic, inverted nucleotide or other terminal cap that is optionally present
  misc_feature (21)..(21): 3'-3 attached terminal deoxyabasic moiety, inverted abasic, inverted nucleotide or other terminal cap that is optionally present
  misc_feature (1). .(19): ribonucleotide unmodified or modified as described for this sequence
cguguacauaguguagguctt

SEQ ID NO: 3460 - DNA, 21 bp, Artificial Sequence
  Description of Artificial Sequence: Target Sequence/siNA antisense region (stab10)
  misc_feature (20)..(20): Phosphorothioate or Phosphorodithioate 3'-Internucleotide Linkage (optionally present)
  misc_feature (1). .(19): ribonucleotide unmodified or modified as described for this sequence
gaccuacacuauguacacgtt

SEQ ID NO: 3461 - DNA, 21 bp, Artificial Sequence
  Description of Artificial Sequence: Target Sequence/siNA antisense region (stab19)
  misc_feature (21)..(21): 3'-3 attached terminal deoxyabasic moiety, inverted abasic, inverted nucleotide or other terminal cap that is optionally present
  misc_feature (1)..(2): 2'-O-methyl
  misc_feature (3)..(5): 2'-deoxy-2'Fluoro
  misc_feature (6)..(6): 2'-O-methyl
  misc_feature (7)..(7): 2'-deoxy-2'Fluoro
  misc_feature (8)..(8): 2'-O-methyl
  misc_feature (9)..(10): 2'-deoxy-2'Fluoro
  misc_feature (11)..(11): 2'-O-methyl
  misc_feature (12)..(12): 2'-deoxy-2'Fluoro
  misc_feature (13)..(13): 2'-O-methyl
  misc_feature (14)..(14): 2'-deoxy-2'Fluoro
  misc_feature (15)..(15): 2'-O-methyl
  misc_feature (16)..(16): 2'-deoxy-2'Fluoro
  misc_feature (17)..(17): 2'-O-methyl
  misc_feature (18)..(18): 2'-deoxy-2'Fluoro
  misc_feature (19)..(19): 2'-O-methyl
  misc_feature (1). .(19): ribonucleotide unmodified or modified as described for this sequence
gaccuacacuauguacacgtt

SEQ ID NO: 3462 - DNA, 21 bp, Artificial Sequence
  Description of Artificial Sequence: Target Sequence/siNA antisense region (stab22)
  misc_feature (21)..(21): 3'-3 attached terminal deoxyabasic moiety, inverted abasic, inverted nucleotide or other terminal cap that is optionally present
  misc_feature (20)..(20): Phosphorothioate or Phosphorodithioate 3'-Internucleotide Linkage (optionally present)
  misc_feature (1). .(19): ribonucleotide unmodified or modified as described for this sequence
gaccuacacuauguacacgtt

SEQ ID NO: 3463 - DNA, 21 bp, Artificial Sequence
  Description of Artificial Sequence: Target Sequence/siNA antisense region (stab25)
  misc_feature (4)..(5): 2'-deoxy-2'Fluoro
  misc_feature (6)..(6): 2'-O-methyl
  misc_feature (7)..(7): 2'-deoxy-2'Fluoro
  misc_feature (8)..(8): 2'-O-methyl
  misc_feature (9)..(10): 2'-deoxy-2'Fluoro
  misc_feature (11)..(11): 2'-O-methyl
  misc_feature (12)..(12): 2'-deoxy-2'Fluoro
  misc_feature (13)..(13): 2'-O-methyl
  misc_feature (14)..(14): 2'-deoxy-2'Fluoro
  misc_feature (15)..(15): 2'-O-methyl
  misc_feature (16)..(16): 2'-deoxy-2'Fluoro
  misc_feature (17)..(17): 2'-O-methyl
  misc_feature (18)..(18): 2'-deoxy-2'Fluoro
  misc_feature (19)..(19): 2'-O-methyl
  misc_feature (20)..(20): Phosphorothioate or Phosphorodithioate 3'-Internucleotide Linkage (optionally present)
  misc_feature (1). .(19): ribonucleotide unmodified or modified as described for this sequence
gaccuacacuauguacacgtt

SEQ ID NO: 3464 - RNA, 21 nt, Artificial Sequence
  Description of Artificial Sequence: Target Sequence/siNA antisense region (stab35)
  misc_feature (4)..(5): 2'-deoxy-2'Fluoro
  misc_feature (6)..(6): 2'-O-methyl
  misc_feature (7)..(7): 2'-deoxy-2'Fluoro
  misc_feature (8)..(8): 2'-O-methyl
  misc_feature (9)..(10): 2'-deoxy-2'Fluoro
  misc_feature (11)..(11): 2'-O-methyl
  misc_feature (12)..(12): 2'-deoxy-2'Fluoro
  misc_feature (13)..(13): 2'-O-methyl
  misc_feature (14)..(14): 2'-deoxy-2'Fluoro
  misc_feature (15)..(15): 2'-O-methyl
  misc_feature (16)..(16): 2'-deoxy-2'Fluoro
  misc_feature (17)..(17): 2'-O-methyl
  misc_feature (18)..(18): 2'-deoxy-2'Fluoro
  misc_feature (19)..(21): 2'-O-methyl
  misc_feature (1). .(19): ribonucleotide unmodified or modified as described for this sequence
gaccuacacuauguacacguu

SEQ ID NO: 3465 - RNA, 21 nt, Artificial Sequence
  Description of Artificial Sequence: Target Sequence/siNA antisense region (stab36)
  misc_feature (4)..(5): 2'-deoxy-2'Fluoro
  misc_feature (6)..(6): 2'-O-methyl
  misc_feature (7)..(7): 2'-deoxy-2'Fluoro
  misc_feature (8)..(8): 2'-O-methyl
  misc_feature (9)..(10): 2'-deoxy-2'Fluoro
  misc_feature (11)..(11): 2'-O-methyl
  misc_feature (12)..(12): 2'-deoxy-2'Fluoro
  misc_feature (13)..(13): 2'-O-methyl
  misc_feature (14)..(14): 2'-deoxy-2'Fluoro
  misc_feature (15)..(15): 2'-O-methyl
  misc_feature (16)..(16): 2'-deoxy-2'Fluoro
  misc_feature (17)..(17): 2'-O-methyl
  misc_feature (18)..(18): 2'-deoxy-2'Fluoro
  misc_feature (19)..(21): 2'-O-methyl
  misc_feature (1). .(19): ribonucleotide unmodified or modified as described for this sequence
gaccuacacuauguacacguc

SEQ ID NO: 3466 - RNA, 19 nt, Artificial Sequence
  Description of Artificial Sequence: Target Sequence/siNA sense region
cagcgugcuuagccuccug

SEQ ID NO: 3467 - RNA, 19 nt, Artificial Sequence
  Description of Artificial Sequence: Target Sequence/siNA antisense region
caggaggcuaagcacgcug

SEQ ID NO: 3468 - DNA, 21 bp, Artificial Sequence
  Description of Artificial Sequence: Target Sequence/siNA sense region (stab00)
  misc_feature (1). .(19): ribonucleotide unmodified or modified as described for this sequence
cagcgugcuuagccuccugtt

SEQ ID NO: 3469 - DNA, 21 bp, Artificial Sequence
  Description of Artificial Sequence: Target Sequence/siNA antisense region (stab00as)
  misc_feature (1). .(19): ribonucleotide unmodified or modified as described for this sequence
caggaggcuaagcacgcugtt

SEQ ID NO: 3470 - DNA, 21 bp, Artificial Sequence
  Description of Artificial Sequence: Target Sequence/siNA sense region (stab04)
  misc_feature (1)..(1): 5'-3 attached terminal deoxyabasic moiety, inverted abasic, inverted nucleotide or other terminal cap that is optionally present
  misc_feature (21)..(21): 3'-3 attached terminal deoxyabasic moiety, inverted abasic, inverted nucleotide or other terminal cap that is optionally present
  misc_feature (1)..(1): 2'-deoxy-2'Fluoro
  misc_feature (4)..(4): 2'-deoxy-2'Fluoro
  misc_feature (6)..(6): 2'-deoxy-2'Fluoro
  misc_feature (8)..(10): 2'-deoxy-2'Fluoro
  misc_feature (13)..(18): 2'-deoxy-2'Fluoro
  misc_feature (1). .(19): ribonucleotide unmodified or modified as described for this sequence
cagcgugcuuagccuccugtt

SEQ ID NO: 3471 - DNA, 21 bp, Artificial Sequence
  Description of Artificial Sequence: Target Sequence/siNA antisense region (stab05)
  misc_feature (1)..(1): 2'-deoxy-2'Fluoro
  misc_feature (8)..(9): 2'-deoxy-2'Fluoro
  misc_feature (13)..(13): 2'-deoxy-2'Fluoro
  misc_feature (15)..(15): 2'-deoxy-2'Fluoro
  misc_feature (17)..(18): 2'-deoxy-2'Fluoro
  misc_feature (20)..(20): Phosphorothioate or Phosphorodithioate 3'-Internucleotide Linkage (optionally present)
  misc_feature (1). .(19): ribonucleotide unmodified or modified as described for this sequence
caggaggcuaagcacgcugtt

SEQ ID NO: 3472 - DNA, 21 bp, Artificial Sequence
  Description of Artificial Sequence: Target Sequence/siNA sense region (stab07)
  misc_feature (1)..(1): 5'-3 attached terminal deoxyabasic moiety, inverted abasic, inverted nucleotide or other terminal cap that is optionally present
  misc_feature (21)..(21): 3'-3 attached terminal deoxyabasic moiety, inverted abasic, inverted nucleotide or other terminal cap that is optionally present
  misc_feature (1)..(1): 2'-deoxy-2'Fluoro
  misc_feature (4)..(4): 2'-deoxy-2'Fluoro
  misc_feature (6)..(6): 2'-deoxy-2'Fluoro
  misc_feature (8)..(10): 2'-deoxy-2'Fluoro
  misc_feature (13)..(18): 2'-deoxy-2'Fluoro
  misc_feature (1). .(19): ribonucleotide unmodified or modified as described for this sequence
cagcgugcuuagccuccugtt

SEQ ID NO: 3473 - DNA, 21 bp, Artificial Sequence
  Description of Artificial Sequence: Target Sequence/siNA antisense region (stab08)
  misc_feature (1)..(1): 2'-deoxy-2'Fluoro
  misc_feature (2)..(7): 2'-O-methyl
  misc_feature (8)..(9): 2'-deoxy-2'Fluoro
  misc_feature (10)..(12): 2'-O-methyl
  misc_feature (13)..(13): 2'-deoxy-2'Fluoro
  misc_feature (14)..(14): 2'-O-methyl
  misc_feature (15)..(15): 2'-deoxy-2'Fluoro
  misc_feature (16)..(16): 2'-O-methyl
  misc_feature (17)..(18): 2'-deoxy-2'Fluoro
  misc_feature (19)..(19): 2'-O-methyl
  misc_feature (20)..(20): Phosphorothioate or Phosphorodithioate 3'-Internucleotide Linkage (optionally present)
  misc_feature (1). .(19): ribonucleotide unmodified or modified as described for this sequence
caggaggcuaagcacgcugtt

SEQ ID NO: 3474 - DNA, 21 bp, Artificial Sequence
  Description of Artificial Sequence: Target Sequence/siNA sense region (stab09)
  misc_feature (1)..(1): 5'-3 attached terminal deoxyabasic moiety, inverted abasic, inverted nucleotide or other terminal cap that is optionally present
  misc_feature (21)..(21): 3'-3 attached terminal deoxyabasic moiety, inverted abasic, inverted nucleotide or other terminal cap that is optionally present
  misc_feature (1). .(19): ribonucleotide unmodified or modified as described for this sequence
cagcgugcuuagccuccugtt

SEQ ID NO: 3475 - DNA, 21 bp, Artificial Sequence
  Description of Artificial Sequence: Target Sequence/siNA antisense region (stab10)
  misc_feature (20)..(20): Phosphorothioate or Phosphorodithioate 3'-Internucleotide Linkage (optionally present)
  misc_feature (1). .(19): ribonucleotide unmodified or modified as described for this sequence
caggaggcuaagcacgcugtt

SEQ ID NO: 3476 - DNA, 21 bp, Artificial Sequence
  Description of Artificial Sequence: Target Sequence/siNA antisense region (stab19)
  misc_feature (21)..(21): 3'-3 attached terminal deoxyabasic moiety, inverted abasic, inverted nucleotide or other terminal cap that is optionally present
  misc_feature (1)..(1): 2'-deoxy-2'Fluoro
  misc_feature (2)..(7): 2'-O-methyl
  misc_feature (8)..(9): 2'-deoxy-2'Fluoro
  misc_feature (10)..(12): 2'-O-methyl
  misc_feature (13)..(13): 2'-deoxy-2'Fluoro
  misc_feature (14)..(14): 2'-O-methyl
  misc_feature (15)..(15): 2'-deoxy-2'Fluoro
  misc_feature (16)..(16): 2'-O-methyl
  misc_feature (17)..(18): 2'-deoxy-2'Fluoro
  misc_feature (19)..(19): 2'-O-methyl
  misc_feature (1). .(19): ribonucleotide unmodified or modified as described for this sequence
caggaggcuaagcacgcugtt

SEQ ID NO: 3477 - DNA, 21 bp, Artificial Sequence
  Description of Artificial Sequence: Target Sequence/siNA antisense region (stab22)
  misc_feature (21)..(21): 3'-3 attached terminal deoxyabasic moiety, inverted abasic, inverted nucleotide or other terminal cap that is optionally present
  misc_feature (20)..(20): Phosphorothioate or Phosphorodithioate 3'-Internucleotide Linkage (optionally present)
  misc_feature (1). .(19): ribonucleotide unmodified or modified as described for this sequence
caggaggcuaagcacgcugtt

SEQ ID NO: 3478 - DNA, 21 bp, Artificial Sequence
  Description of Artificial Sequence: Target Sequence/siNA antisense region (stab25)
  misc_feature (4)..(7): 2'-O-methyl
  misc_feature (8)..(9): 2'-deoxy-2'Fluoro
  misc_feature (10)..(12): 2'-O-methyl
  misc_feature (13)..(13): 2'-deoxy-2'Fluoro
  misc_feature (14)..(14): 2'-O-methyl
  misc_feature (15)..(15): 2'-deoxy-2'Fluoro
  misc_feature (16)..(16): 2'-O-methyl
  misc_feature (17)..(18): 2'-deoxy-2'Fluoro
  misc_feature (19)..(19): 2'-O-methyl
  misc_feature (20)..(20): Phosphorothioate or Phosphorodithioate 3'-Internucleotide Linkage (optionally present)
  misc_feature (1). .(19): ribonucleotide unmodified or modified as described for this sequence
caggaggcuaagcacgcugtt

SEQ ID NO: 3479 - RNA, 21 nt, Artificial Sequence
  Description of Artificial Sequence: Target Sequence/siNA antisense region (stab35)
  misc_feature (4)..(7): 2'-O-methyl
  misc_feature (8)..(9): 2'-deoxy-2'Fluoro
  misc_feature (10)..(12): 2'-O-methyl
  misc_feature (13)..(13): 2'-deoxy-2'Fluoro
  misc_feature (14)..(14): 2'-O-methyl
  misc_feature (15)..(15): 2'-deoxy-2'Fluoro
  misc_feature (16)..(16): 2'-O-methyl
  misc_feature (17)..(18): 2'-deoxy-2'Fluoro
  misc_feature (19)..(21): 2'-O-methyl
caggaggcuaagcacgcuguu

SEQ ID NO: 3480 - RNA, 21 nt, Artificial Sequence
  Description of Artificial Sequence: Target Sequence/siNA antisense region (stab36)
  misc_feature (4)..(7): 2'-O-methyl
  misc_feature (8)..(9): 2'-deoxy-2'Fluoro
  misc_feature (10)..(12): 2'-O-methyl
  misc_feature (13)..(13): 2'-deoxy-2'Fluoro
  misc_feature (14)..(14): 2'-O-methyl
  misc_feature (15)..(15): 2'-deoxy-2'Fluoro
  misc_feature (16)..(16): 2'-O-methyl
  misc_feature (17)..(18): 2'-deoxy-2'Fluoro
  misc_feature (19)..(21): 2'-O-methyl
caggaggcuaagcacgcugac

SEQ ID NO: 3481 - RNA, 19 nt, Artificial Sequence
  Description of Artificial Sequence: Target Sequence/siNA sense region
gaccugaggcuccugugcu

SEQ ID NO: 3482 - RNA, 19 nt, Artificial Sequence
  Description of Artificial Sequence: Target Sequence/siNA antisense region
agcacaggagccucagguc

SEQ ID NO: 3483 - DNA, 21 bp, Artificial Sequence
  Description of Artificial Sequence: Target Sequence/siNA sense region (stab00)
  misc_feature (1). .(19): ribonucleotide unmodified or modified as described for this sequence
gaccugaggcuccugugcutt

SEQ ID NO: 3484 - DNA, 21 bp, Artificial Sequence
  Description of Artificial Sequence: Target Sequence/siNA antisense region (stab00as)
  misc_feature (1). .(19): ribonucleotide unmodified or modified as described for this sequence
agcacaggagccucagguctt

SEQ ID NO: 3485 - DNA, 21 bp, Artificial Sequence
  Description of Artificial Sequence: Target Sequence/siNA sense region (stab04)
  misc_feature (1)..(1): 5'-3 attached terminal deoxyabasic moiety, inverted abasic, inverted nucleotide or other terminal cap that is optionally present
  misc_feature (21)..(21): 3'-3 attached terminal deoxyabasic moiety, inverted abasic, inverted nucleotide or other terminal cap that is optionally present
  misc_feature (3)..(5): 2'-deoxy-2'Fluoro
  misc_feature (10)..(14): 2'-deoxy-2'Fluoro
  misc_feature (16)..(16): 2'-deoxy-2'Fluoro
  misc_feature (18)..(19): 2'-deoxy-2'Fluoro
  misc_feature (1). .(19): ribonucleotide unmodified or modified as described for this sequence
gaccugaggcuccugugcutt

SEQ ID NO: 3486 - DNA, 21 bp, Artificial Sequence
  Description of Artificial Sequence: Target Sequence/siNA antisense region (stab05)
  misc_feature (3)..(3): 2'-deoxy-2'Fluoro
  misc_feature (5)..(5): 2'-deoxy-2'Fluoro
  misc_feature (11)..(14): 2'-deoxy-2'Fluoro
  misc_feature (18)..(19): 2'-deoxy-2'Fluoro
  misc_feature (20)..(20): Phosphorothioate or Phosphorodithioate 3'-Internucleotide Linkage (optionally present)
  misc_feature (1). .(19): ribonucleotide unmodified or modified as described for this sequence
agcacaggagccucagguctt

SEQ ID NO: 3487 - DNA, 21 bp, Artificial Sequence
  Description of Artificial Sequence: Target Sequence/siNA sense region (stab07)
  misc_feature (1)..(1): 5'-3 attached terminal deoxyabasic moiety, inverted abasic, inverted nucleotide or other terminal cap that is optionally present
  misc_feature (21)..(21): 3'-3 attached terminal deoxyabasic moiety, inverted abasic, inverted nucleotide or other terminal cap that is optionally present
  misc_feature (3)..(5): 2'-deoxy-2'Fluoro
  misc_feature (10)..(14): 2'-deoxy-2'Fluoro
  misc_feature (16)..(16): 2'-deoxy-2'Fluoro
  misc_feature (18)..(19): 2'-deoxy-2'Fluoro
  misc_feature (1). .(19): ribonucleotide unmodified or modified as described for this sequence
gaccugaggcuccugugcutt

SEQ ID NO: 3488 - DNA, 21 bp, Artificial Sequence
  Description of Artificial Sequence: Target Sequence/siNA antisense region (stab08)
  misc_feature (1)..(2): 2'-O-methyl
  misc_feature (3)..(3): 2'-deoxy-2'Fluoro
  misc_feature (4)..(4): 2'-O-methyl
  misc_feature (5)..(5): 2'-deoxy-2'Fluoro
  misc_feature (6)..(10): 2'-O-methyl
  misc_feature (11)..(14): 2'-deoxy-2'Fluoro
  misc_feature (15)..(17): 2'-O-methyl
  misc_feature (18)..(19): 2'-deoxy-2'Fluoro
  misc_feature (20)..(20): Phosphorothioate or Phosphorodithioate 3'-Internucleotide Linkage (optionally present)
  misc_feature (1). .(19): ribonucleotide unmodified or modified as described for this sequence
agcacaggagccucagguctt

SEQ ID NO: 3489 - DNA, 21 bp, Artificial Sequence
  Description of Artificial Sequence: Target Sequence/siNA sense region (stab09)
  misc_feature (1)..(1): 5'-3 attached terminal deoxyabasic moiety, inverted abasic, inverted nucleotide or other terminal cap that is optionally present
  misc_feature (21)..(21): 3'-3 attached terminal deoxyabasic moiety, inverted abasic, inverted nucleotide or other terminal cap that is optionally present
  misc_feature (1). .(19): ribonucleotide unmodified or modified as described for this sequence
gaccugaggcuccugugcutt

SEQ ID NO: 3490 - DNA, 21 bp, Artificial Sequence
  Description of Artificial Sequence: Target Sequence/siNA antisense region (stab10)
  misc_feature (20)..(20): Phosphorothioate or Phosphorodithioate 3'-Internucleotide Linkage (optionally present)
  misc_feature (1). .(19): ribonucleotide unmodified or modified as described for this sequence
agcacaggagccucagguctt

SEQ ID NO: 3491 - DNA, 21 bp, Artificial Sequence
  Description of Artificial Sequence: Target Sequence/siNA antisense region (stab19)
  misc_feature (21)..(21): 3'-3 attached terminal deoxyabasic moiety, inverted abasic, inverted nucleotide or other terminal cap that is optionally present
  misc_feature (1)..(2): 2'-O-methyl
  misc_feature (3)..(3): 2'-deoxy-2'Fluoro
  misc_feature (4)..(4): 2'-O-methyl
  misc_feature (5)..(5): 2'-deoxy-2'Fluoro
  misc_feature (6)..(10): 2'-O-methyl
  misc_feature (11)..(14): 2'-deoxy-2'Fluoro
  misc_feature (15)..(17): 2'-O-methyl
  misc_feature (18)..(19): 2'-deoxy-2'Fluoro
  misc_feature (1). .(19): ribonucleotide unmodified or modified as described for this sequence
agcacaggagccucagguctt

SEQ ID NO: 3492 - DNA, 21 bp, Artificial Sequence
  Description of Artificial Sequence: Target Sequence/siNA antisense region (stab22)
  misc_feature (21)..(21): 3'-3 attached terminal deoxyabasic moiety, inverted abasic, inverted nucleotide or other terminal cap that is optionally present
  misc_feature (20)..(20): Phosphorothioate or Phosphorodithioate 3'-Internucleotide Linkage (optionally present)
  misc_feature (1). .(19): ribonucleotide unmodified or modified as described for this sequence
agcacaggagccucagguctt

SEQ ID NO: 3493 - DNA, 21 bp, Artificial Sequence
  Description of Artificial Sequence: Target Sequence/siNA antisense region (stab25)
  misc_feature (4)..(4): 2'-O-methyl
  misc_feature (5)..(5): 2'-deoxy-2'Fluoro
  misc_feature (6)..(10): 2'-O-methyl
  misc_feature (11)..(14): 2'-deoxy-2'Fluoro
  misc_feature (15)..(17): 2'-O-methyl
  misc_feature (18)..(19): 2'-deoxy-2'Fluoro
  misc_feature (20)..(20): Phosphorothioate or Phosphorodithioate 3'-Internucleotide Linkage (optionally present)
  misc_feature (1). .(19): ribonucleotide unmodified or modified as described for this sequence
agcacaggagccucagguctt

SEQ ID NO: 3494 - RNA, 21 nt, Artificial Sequence
  Description of Artificial Sequence: Target Sequence/siNA antisense region (stab35)
  misc_feature (4)..(4): 2'-O-methyl
  misc_feature (5)..(5): 2'-deoxy-2'Fluoro
  misc_feature (6)..(10): 2'-O-methyl
  misc_feature (11)..(14): 2'-deoxy-2'Fluoro
  misc_feature (15)..(17): 2'-O-methyl
  misc_feature (18)..(19): 2'-deoxy-2'Fluoro
  misc_feature (20)..(21): 2'-O-methyl
agcacaggagccucaggucuu

SEQ ID NO: 3495 - RNA, 21 nt, Artificial Sequence
  Description of Artificial Sequence: Target Sequence/siNA antisense region (stab36)
  misc_feature (4)..(4): 2'-O-methyl
  misc_feature (5)..(5): 2'-deoxy-2'Fluoro
  misc_feature (6)..(10): 2'-O-methyl
  misc_feature (11)..(14): 2'-deoxy-2'Fluoro
  misc_feature (15)..(17): 2'-O-methyl
  misc_feature (18)..(19): 2'-deoxy-2'Fluoro
  misc_feature (20)..(21): 2'-O-methyl
agcacaggagccucaggucag

SEQ ID NO: 3496 - RNA, 19 nt, Artificial Sequence
  Description of Artificial Sequence: Target Sequence/siNA sense region
uacuuugccuuuugcaaac

SEQ ID NO: 3497 - RNA, 19 nt, Artificial Sequence
  Description of Artificial Sequence: Target Sequence/siNA antisense region
guuugcaaaaggcaaagua

SEQ ID NO: 3498 - DNA, 21 bp, Artificial Sequence
  Description of Artificial Sequence: Target Sequence/siNA sense region (stab00)
  misc_feature (1). .(19): ribonucleotide unmodified or modified as described for this sequence
uacuuugccuuuugcaaactt

SEQ ID NO: 3499 - DNA, 21 bp, Artificial Sequence
  Description of Artificial Sequence: Target Sequence/siNA antisense region (stab00as)
  misc_feature (1). .(19): ribonucleotide unmodified or modified as described for this sequence
guuugcaaaaggcaaaguatt

SEQ ID NO: 3500 - DNA, 21 bp, Artificial Sequence
  Description of Artificial Sequence: Target Sequence/siNA sense region (stab04)
  misc_feature (1)..(1): 5'-3 attached terminal deoxyabasic moiety, inverted abasic, inverted nucleotide or other terminal cap that is optionally present
  misc_feature (21)..(21): 3'-3 attached terminal deoxyabasic moiety, inverted abasic, inverted nucleotide or other terminal cap that is optionally present
  misc_feature (1)..(1): 2'-deoxy-2'Fluoro
  misc_feature (3)..(6): 2'-deoxy-2'Fluoro
  misc_feature (8)..(13): 2'-deoxy-2'Fluoro
  misc_feature (15)..(15): 2'-deoxy-2'Fluoro
  misc_feature (19)..(19): 2'-deoxy-2'Fluoro
  misc_feature (1). .(19): ribonucleotide unmodified or modified as described for this sequence
uacuuugccuuuugcaaactt

SEQ ID NO: 3501 - DNA, 21 bp, Artificial Sequence
  Description of Artificial Sequence: Target Sequence/siNA antisense region (stab05)
  misc_feature (2)..(4): 2'-deoxy-2'Fluoro
  misc_feature (6)..(6): 2'-deoxy-2'Fluoro
  misc_feature (13)..(13): 2'-deoxy-2'Fluoro
  misc_feature (18)..(18): 2'-deoxy-2'Fluoro
  misc_feature (20)..(20): Phosphorothioate or Phosphorodithioate 3'-Internucleotide Linkage (optionally present)
  misc_feature (1). .(19): ribonucleotide unmodified or modified as described for this sequence
guuugcaaaaggcaaaguatt

SEQ ID NO: 3502 - DNA, 21 bp, Artificial Sequence
  Description of Artificial Sequence: Target Sequence/siNA sense region (stab07)
  misc_feature (1)..(1): 5'-3 attached terminal deoxyabasic moiety, inverted abasic, inverted nucleotide or other terminal cap that is optionally present
  misc_feature (21)..(21): 3'-3 attached terminal deoxyabasic moiety, inverted abasic, inverted nucleotide or other terminal cap that is optionally present
  misc_feature (1)..(1): 2'-deoxy-2'Fluoro
  misc_feature (3)..(6): 2'-deoxy-2'Fluoro
  misc_feature (8)..(13): 2'-deoxy-2'Fluoro
  misc_feature (15)..(15): 2'-deoxy-2'Fluoro
  misc_feature (19)..(19): 2'-deoxy-2'Fluoro
  misc_feature (1). .(19): ribonucleotide unmodified or modified as described for this sequence
uacuuugccuuuugcaaactt

SEQ ID NO: 3503 - DNA, 21 bp, Artificial Sequence
  Description of Artificial Sequence: Target Sequence/siNA antisense region (stab08)
  misc_feature (1)..(1): 2'-O-methyl
  misc_feature (2)..(4): 2'-deoxy-2'Fluoro
  misc_feature (5)..(5): 2'-O-methyl
  misc_feature (6)..(6): 2'-deoxy-2'Fluoro
  misc_feature (7)..(12): 2'-O-methyl
  misc_feature (13)..(13): 2'-deoxy-2'Fluoro
  misc_feature (14)..(17): 2'-O-methyl
  misc_feature (18)..(18): 2'-deoxy-2'Fluoro
  misc_feature (19)..(19): 2'-O-methyl
  misc_feature (20)..(20): Phosphorothioate or Phosphorodithioate 3'-Internucleotide Linkage (optionally present)
  misc_feature (1). .(19): ribonucleotide unmodified or modified as described for this sequence
guuugcaaaaggcaaaguatt

SEQ ID NO: 3504 - DNA, 21 bp, Artificial Sequence
  Description of Artificial Sequence: Target Sequence/siNA sense region (stab09)
  misc_feature (1)..(1): 5'-3 attached terminal deoxyabasic moiety, inverted abasic, inverted nucleotide or other terminal cap that is optionally present
  misc_feature (21)..(21): 3'-3 attached terminal deoxyabasic moiety, inverted abasic, inverted nucleotide or other terminal cap that is optionally present
  misc_feature (1). .(19): ribonucleotide unmodified or modified as described for this sequence
uacuuugccuuuugcaaactt

SEQ ID NO: 3505 - DNA, 21 bp, Artificial Sequence
  Description of Artificial Sequence: Target Sequence/siNA antisense region (stab10)
  misc_feature (20)..(20): Phosphorothioate or Phosphorodithioate 3'-Internucleotide Linkage (optionally present)
  misc_feature (1). .(19): ribonucleotide unmodified or modified as described for this sequence
guuugcaaaaggcaaaguatt

SEQ ID NO: 3506 - DNA, 21 bp, Artificial Sequence
  Description of Artificial Sequence: Target Sequence/siNA antisense region (stab19)
  misc_feature (21)..(21): 3'-3 attached terminal deoxyabasic moiety, inverted abasic, inverted nucleotide or other terminal cap that is optionally present
  misc_feature (1)..(1): 2'-O-methyl
  misc_feature (2)..(4): 2'-deoxy-2'Fluoro
  misc_feature (5)..(5): 2'-O-methyl
  misc_feature (6)..(6): 2'-deoxy-2'Fluoro
  misc_feature (7)..(12): 2'-O-methyl
  misc_feature (13)..(13): 2'-deoxy-2'Fluoro
  misc_feature (14)..(17): 2'-O-methyl
  misc_feature (18)..(18): 2'-deoxy-2'Fluoro
  misc_feature (19)..(19): 2'-O-methyl
  misc_feature (1). .(19): ribonucleotide unmodified or modified as described for this sequence
guuugcaaaaggcaaaguatt

SEQ ID NO: 3507 - DNA, 21 bp, Artificial Sequence
  Description of Artificial Sequence: Target Sequence/siNA antisense region (stab22)
  misc_feature (21)..(21): 3'-3 attached terminal deoxyabasic moiety, inverted abasic, inverted nucleotide or other terminal cap that is optionally present
  misc_feature (20)..(20): Phosphorothioate or Phosphorodithioate 3'-Internucleotide Linkage (optionally present)
  misc_feature (1). .(19): ribonucleotide unmodified or modified as described for this sequence
guuugcaaaaggcaaaguatt

SEQ ID NO: 3508 - DNA, 21 bp, Artificial Sequence
  Description of Artificial Sequence: Target Sequence/siNA antisense region (stab25)
  misc_feature (4)..(4): 2'-deoxy-2'Fluoro
  misc_feature (5)..(5): 2'-O-methyl
  misc_feature (6)..(6): 2'-deoxy-2'Fluoro
  misc_feature (7)..(12): 2'-O-methyl
  misc_feature (13)..(13): 2'-deoxy-2'Fluoro
  misc_feature (14)..(17): 2'-O-methyl
  misc_feature (18)..(18): 2'-deoxy-2'Fluoro
  misc_feature (19)..(19): 2'-O-methyl
  misc_feature (20)..(20): Phosphorothioate or Phosphorodithioate 3'-Internucleotide Linkage (optionally present)
  misc_feature (1). .(19): ribonucleotide unmodified or modified as described for this sequence
guuugcaaaaggcaaaguatt

SEQ ID NO: 3509 - RNA, 21 nt, Artificial Sequence
  Description of Artificial Sequence: Target Sequence/siNA antisense region (stab35)
  misc_feature (4)..(4): 2'-deoxy-2'Fluoro
  misc_feature (5)..(5): 2'-O-methyl
  misc_feature (6)..(6): 2'-deoxy-2'Fluoro
  misc_feature (7)..(12): 2'-O-methyl
  misc_feature (13)..(13): 2'-deoxy-2'Fluoro
  misc_feature (14)..(17): 2'-O-methyl
  misc_feature (18)..(18): 2'-deoxy-2'Fluoro
  misc_feature (19)..(21): 2'-O-methyl
guuugcaaaaggcaaaguauu

SEQ ID NO: 3510 - RNA, 21 nt, Artificial Sequence
  Description of Artificial Sequence: Target Sequence/siNA antisense region (stab36)
  misc_feature (4)..(4): 2'-deoxy-2'Fluoro
  misc_feature (5)..(5): 2'-O-methyl
  misc_feature (6)..(6): 2'-deoxy-2'Fluoro
  misc_feature (7)..(12): 2'-O-methyl
  misc_feature (13)..(13): 2'-deoxy-2'Fluoro
  misc_feature (14)..(17): 2'-O-methyl
  misc_feature (18)..(18): 2'-deoxy-2'Fluoro
  misc_feature (19)..(21): 2'-O-methyl
guuugcaaaaggcaaaguagc

SEQ ID NO: 3511 - RNA, 19 nt, Artificial Sequence
  Description of Artificial Sequence: Target Sequence/siNA sense region
cuuuauuuucauagauuga

SEQ ID NO: 3512 - RNA, 19 nt, Artificial Sequence
  Description of Artificial Sequence: Target Sequence/siNA antisense region
ucaaucuaugaaaauaaag

SEQ ID NO: 3513 - DNA, 21 bp, Artificial Sequence
  Description of Artificial Sequence: Target Sequence/siNA sense region (stab00)
  misc_feature (1). .(19): ribonucleotide unmodified or modified as described for this sequence
cuuuauuuucauagauugatt

SEQ ID NO: 3514 - DNA, 21 bp, Artificial Sequence
  Description of Artificial Sequence: Target Sequence/siNA antisense region (stab00as)
  misc_feature (1). .(19): ribonucleotide unmodified or modified as described for this sequence
ucaaucuaugaaaauaaagtt

SEQ ID NO: 3515 - DNA, 21 bp, Artificial Sequence
  Description of Artificial Sequence: Target Sequence/siNA sense region (stab04)
  misc_feature (1)..(1): 5'-3 attached terminal deoxyabasic moiety, inverted abasic, inverted nucleotide or other terminal cap that is optionally present
  misc_feature (21)..(21): 3'-3 attached terminal deoxyabasic moiety, inverted abasic, inverted nucleotide or other terminal cap that is optionally present
  misc_feature (1)..(4): 2'-deoxy-2'Fluoro
  misc_feature (6)..(10): 2'-deoxy-2'Fluoro
  misc_feature (12)..(12): 2'-deoxy-2'Fluoro
  misc_feature (16)..(17): 2'-deoxy-2'Fluoro
  misc_feature (1). .(19): ribonucleotide unmodified or modified as described for this sequence
cuuuauuuucauagauugatt

SEQ ID NO: 3516 - DNA, 21 bp, Artificial Sequence
  Description of Artificial Sequence: Target Sequence/siNA antisense region (stab05)
  misc_feature (1)..(2): 2'-deoxy-2'Fluoro
  misc_feature (5)..(7): 2'-deoxy-2'Fluoro
  misc_feature (9)..(9): 2'-deoxy-2'Fluoro
  misc_feature (15)..(15): 2'-deoxy-2'Fluoro
  misc_feature (20)..(20): Phosphorothioate or Phosphorodithioate 3'-Internucleotide Linkage (optionally present)
  misc_feature (1). .(19): ribonucleotide unmodified or modified as described for this sequence
ucaaucuaugaaaauaaagtt

SEQ ID NO: 3517 - DNA, 21 bp, Artificial Sequence
  Description of Artificial Sequence: Target Sequence/siNA sense region (stab07)
  misc_feature (1)..(1): 5'-3 attached terminal deoxyabasic moiety, inverted abasic, inverted nucleotide or other terminal cap that is optionally present
  misc_feature (21)..(21): 3'-3 attached terminal deoxyabasic moiety, inverted abasic, inverted nucleotide or other terminal cap that is optionally present
  misc_feature (1)..(4): 2'-deoxy-2'Fluoro
  misc_feature (6)..(10): 2'-deoxy-2'Fluoro
  misc_feature (12)..(12): 2'-deoxy-2'Fluoro
  misc_feature (16)..(17): 2'-deoxy-2'Fluoro
  misc_feature (1). .(19): ribonucleotide unmodified or modified as described for this sequence
cuuuauuuucauagauugatt

SEQ ID NO: 3518 - DNA, 21 bp, Artificial Sequence
  Description of Artificial Sequence: Target Sequence/siNA antisense region (stab08)
  misc_feature (1)..(2): 2'-deoxy-2'Fluoro
  misc_feature (3)..(4): 2'-O-methyl
  misc_feature (5)..(7): 2'-deoxy-2'Fluoro
  misc_feature (8)..(8): 2'-O-methyl
  misc_feature (9)..(9): 2'-deoxy-2'Fluoro
  misc_feature (10)..(14): 2'-O-methyl
  misc_feature (15)..(15): 2'-deoxy-2'Fluoro
  misc_feature (16)..(19): 2'-O-methyl
  misc_feature (20)..(20): Phosphorothioate or Phosphorodithioate 3'-Internucleotide Linkage (optionally present)
  misc_feature (1). .(19): ribonucleotide unmodified or modified as described for this sequence
ucaaucuaugaaaauaaagtt

SEQ ID NO: 3519 - DNA, 21 bp, Artificial Sequence
  Description of Artificial Sequence: Target Sequence/siNA sense region (stab09)
  misc_feature (1)..(1): 5'-3 attached terminal deoxyabasic moiety, inverted abasic, inverted nucleotide or other terminal cap that is optionally present
  misc_feature (21)..(21): 3'-3 attached terminal deoxyabasic moiety, inverted abasic, inverted nucleotide or other terminal cap that is optionally present
  misc_feature (1). .(19): ribonucleotide unmodified or modified as described for this sequence
cuuuauuuucauagauugatt

SEQ ID NO: 3520 - DNA, 21 bp, Artificial Sequence
  Description of Artificial Sequence: Target Sequence/siNA antisense region (stab10)
  misc_feature (20)..(20): Phosphorothioate or Phosphorodithioate 3'-Internucleotide Linkage (optionally present)
  misc_feature (1). .(19): ribonucleotide unmodified or modified as described for this sequence
ucaaucuaugaaaauaaagtt

SEQ ID NO: 3521 - DNA, 21 bp, Artificial Sequence
  Description of Artificial Sequence: Target Sequence/siNA antisense region (stab19)
  misc_feature (21)..(21): 3'-3 attached terminal deoxyabasic moiety, inverted abasic, inverted nucleotide or other terminal cap that is optionally present
  misc_feature (1)..(2): 2'-deoxy-2'Fluoro
  misc_feature (3)..(4): 2'-O-methyl
  misc_feature (5)..(7): 2'-deoxy-2'Fluoro
  misc_feature (8)..(8): 2'-O-methyl
  misc_feature (9)..(9): 2'-deoxy-2'Fluoro
  misc_feature (10)..(14): 2'-O-methyl
  misc_feature (15)..(15): 2'-deoxy-2'Fluoro
  misc_feature (16)..(19): 2'-O-methyl
  misc_feature (1). .(19): ribonucleotide unmodified or modified as described for this sequence
ucaaucuaugaaaauaaagtt

SEQ ID NO: 3522 - DNA, 21 bp, Artificial Sequence
  Description of Artificial Sequence: Target Sequence/siNA antisense region (stab22)
  misc_feature (21)..(21): 3'-3 attached terminal deoxyabasic moiety, inverted abasic, inverted nucleotide or other terminal cap that is optionally present
  misc_feature (20)..(20): Phosphorothioate or Phosphorodithioate 3'-Internucleotide Linkage (optionally present)
  misc_feature (1). .(19): ribonucleotide unmodified or modified as described for this sequence
ucaaucuaugaaaauaaagtt

SEQ ID NO: 3523 - DNA, 21 bp, Artificial Sequence
  Description of Artificial Sequence: Target Sequence/siNA antisense region (stab25)
  misc_feature (4)..(4): 2'-O-methyl
  misc_feature (5)..(7): 2'-deoxy-2'Fluoro
  misc_feature (8)..(8): 2'-O-methyl
  misc_feature (9)..(9): 2'-deoxy-2'Fluoro
  misc_feature (10)..(14): 2'-O-methyl
  misc_feature (15)..(15): 2'-deoxy-2'Fluoro
  misc_feature (16)..(19): 2'-O-methyl
  misc_feature (20)..(20): Phosphorothioate or Phosphorodithioate 3'-Internucleotide Linkage (optionally present)
  misc_feature (1). .(19): ribonucleotide unmodified or modified as described for this sequence
ucaaucuaugaaaauaaagtt

SEQ ID NO: 3524 - RNA, 21 nt, Artificial Sequence
  Description of Artificial Sequence: Target Sequence/siNA antisense region (stab35)
  misc_feature (4)..(4): 2'-O-methyl
  misc_feature (5)..(7): 2'-deoxy-2'Fluoro
  misc_feature (8)..(8): 2'-O-methyl
  misc_feature (9)..(9): 2'-deoxy-2'Fluoro
  misc_feature (10)..(14): 2'-O-methyl
  misc_feature (15)..(15): 2'-deoxy-2'Fluoro
  misc_feature (16)..(21): 2'-O-methyl
ucaaucuaugaaaauaaaguu

SEQ ID NO: 3525 - RNA, 21 nt, Artificial Sequence
  Description of Artificial Sequence: Target Sequence/siNA antisense region (stab36)
  misc_feature (4)..(4): 2'-O-methyl
  misc_feature (5)..(7): 2'-deoxy-2'Fluoro
  misc_feature (8)..(8): 2'-O-methyl
  misc_feature (9)..(9): 2'-deoxy-2'Fluoro
  misc_feature (10)..(14): 2'-O-methyl
  misc_feature (15)..(15): 2'-deoxy-2'Fluoro
  misc_feature (16)..(21): 2'-O-methyl
ucaaucuaugaaaauaaaguu

SEQ ID NO: 3526 - RNA, 19 nt, Artificial Sequence
  Description of Artificial Sequence: Target Sequence/siNA sense region
agaaguuuuguacagagaa

SEQ ID NO: 3527 - RNA, 19 nt, Artificial Sequence
  Description of Artificial Sequence: Target Sequence/siNA antisense region
uucucuguacaaaacuucu

SEQ ID NO: 3528 - DNA, 21 bp, Artificial Sequence
  Description of Artificial Sequence: Target Sequence/siNA sense region (stab00)
  misc_feature (1). .(19): ribonucleotide unmodified or modified as described for this sequence
agaaguuuuguacagagaatt

SEQ ID NO: 3529 - DNA, 21 bp, Artificial Sequence
  Description of Artificial Sequence: Target Sequence/siNA antisense region (stab00as)
  misc_feature (1). .(19): ribonucleotide unmodified or modified as described for this sequence
uucucuguacaaaacuucutt

SEQ ID NO: 3530 - DNA, 21 bp, Artificial Sequence
  Description of Artificial Sequence: Target Sequence/siNA sense region (stab04)
  misc_feature (1)..(1): 5'-3 attached terminal deoxyabasic moiety, inverted abasic, inverted nucleotide or other terminal cap that is optionally present
  misc_feature (21)..(21): 3'-3 attached terminal deoxyabasic moiety, inverted abasic, inverted nucleotide or other terminal cap that is optionally present
  misc_feature (6)..(9): 2'-deoxy-2'Fluoro
  misc_feature (11)..(11): 2'-deoxy-2'Fluoro
  misc_feature (13)..(13): 2'-deoxy-2'Fluoro
  misc_feature (1). .(19): ribonucleotide unmodified or modified as described for this sequence
agaaguuuuguacagagaatt

SEQ ID NO: 3531 - DNA, 21 bp, Artificial Sequence
  Description of Artificial Sequence: Target Sequence/siNA antisense region (stab05)
  misc_feature (1)..(6): 2'-deoxy-2'Fluoro
  misc_feature (8)..(8): 2'-deoxy-2'Fluoro
  misc_feature (10)..(10): 2'-deoxy-2'Fluoro
  misc_feature (15)..(19): 2'-deoxy-2'Fluoro
  misc_feature (20)..(20): Phosphorothioate or Phosphorodithioate 3'-Internucleotide Linkage (optionally present)
  misc_feature (1). .(19): ribonucleotide unmodified or modified as described for this sequence
uucucuguacaaaacuucutt

SEQ ID NO: 3532 - DNA, 21 bp, Artificial Sequence
  Description of Artificial Sequence: Target Sequence/siNA sense region (stab07)
  misc_feature (1)..(1): 5'-3 attached terminal deoxyabasic moiety, inverted abasic, inverted nucleotide or other terminal cap that is optionally present
  misc_feature (21)..(21): 3'-3 attached terminal deoxyabasic moiety, inverted abasic, inverted nucleotide or other terminal cap that is optionally present
  misc_feature (6)..(9): 2'-deoxy-2'Fluoro
  misc_feature (11)..(11): 2'-deoxy-2'Fluoro
  misc_feature (13)..(13): 2'-deoxy-2'Fluoro
  misc_feature (1). .(19): ribonucleotide unmodified or modified as described for this sequence
agaaguuuuguacagagaatt

SEQ ID NO: 3533 - DNA, 21 bp, Artificial Sequence
  Description of Artificial Sequence: Target Sequence/siNA antisense region (stab08)
  misc_feature (1)..(6): 2'-deoxy-2'Fluoro
  misc_feature (7)..(7): 2'-O-methyl
  misc_feature (8)..(8): 2'-deoxy-2'Fluoro
  misc_feature (9)..(9): 2'-O-methyl
  misc_feature (10)..(10): 2'-deoxy-2'Fluoro
  misc_feature (11)..(14): 2'-O-methyl
  misc_feature (15)..(19): 2'-deoxy-2'Fluoro
  misc_feature (20)..(20): Phosphorothioate or Phosphorodithioate 3'-Internucleotide Linkage (optionally present)
  misc_feature (1). .(19): ribonucleotide unmodified or modified as described for this sequence
uucucuguacaaaacuucutt

SEQ ID NO: 3534 - DNA, 21 bp, Artificial Sequence
  Description of Artificial Sequence: Target Sequence/siNA sense region (stab09)
  misc_feature (1)..(1): 5'-3 attached terminal deoxyabasic moiety, inverted abasic, inverted nucleotide or other terminal cap that is optionally present
  misc_feature (21)..(21): 3'-3 attached terminal deoxyabasic moiety, inverted abasic, inverted nucleotide or other terminal cap that is optionally present
  misc_feature (1). .(19): ribonucleotide unmodified or modified as described for this sequence
agaaguuuuguacagagaatt

SEQ ID NO: 3535 - DNA, 21 bp, Artificial Sequence
  Description of Artificial Sequence: Target Sequence/siNA antisense region (stab10)
  misc_feature (20)..(20): Phosphorothioate or Phosphorodithioate 3'-Internucleotide Linkage (optionally present)
  misc_feature (1). .(19): ribonucleotide unmodified or modified as described for this sequence
uucucuguacaaaacuucutt

SEQ ID NO: 3536 - DNA, 21 bp, Artificial Sequence
  Description of Artificial Sequence: Target Sequence/siNA antisense region (stab19)
  misc_feature (21)..(21): 3'-3 attached terminal deoxyabasic moiety, inverted abasic, inverted nucleotide or other terminal cap that is optionally present
  misc_feature (1)..(6): 2'-deoxy-2'Fluoro
  misc_feature (7)..(7): 2'-O-methyl
  misc_feature (8)..(8): 2'-deoxy-2'Fluoro
  misc_feature (9)..(9): 2'-O-methyl
  misc_feature (10)..(10): 2'-deoxy-2'Fluoro
  misc_feature (11)..(14): 2'-O-methyl
  misc_feature (15)..(19): 2'-deoxy-2'Fluoro
  misc_feature (1). .(19): ribonucleotide unmodified or modified as described for this sequence
uucucuguacaaaacuucutt

SEQ ID NO: 3537 - DNA, 21 bp, Artificial Sequence
  Description of Artificial Sequence: Target Sequence/siNA antisense region (stab22)
  misc_feature (21)..(21): 3'-3 attached terminal deoxyabasic moiety, inverted abasic, inverted nucleotide or other terminal cap that is optionally present
  misc_feature (20)..(20): Phosphorothioate or Phosphorodithioate 3'-Internucleotide Linkage (optionally present)
  misc_feature (1). .(19): ribonucleotide unmodified or modified as described for this sequence
uucucuguacaaaacuucutt

SEQ ID NO: 3538 - DNA, 21 bp, Artificial Sequence
  Description of Artificial Sequence: Target Sequence/siNA antisense region (stab25)
  misc_feature (4)..(6): 2'-deoxy-2'Fluoro
  misc_feature (7)..(7): 2'-O-methyl
  misc_feature (8)..(8): 2'-deoxy-2'Fluoro
  misc_feature (9)..(9): 2'-O-methyl
  misc_feature (10)..(10): 2'-deoxy-2'Fluoro
  misc_feature (11)..(14): 2'-O-methyl
  misc_feature (15)..(19): 2'-deoxy-2'Fluoro
  misc_feature (20)..(20): Phosphorothioate or Phosphorodithioate 3'-Internucleotide Linkage (optionally present)
  misc_feature (1). .(19): ribonucleotide unmodified or modified as described for this sequence
uucucuguacaaaacuucutt

SEQ ID NO: 3539 - RNA, 21 nt, Artificial Sequence
  Description of Artificial Sequence: Target Sequence/siNA antisense region (stab35)
  misc_feature (4)..(6): 2'-deoxy-2'Fluoro
  misc_feature (7)..(7): 2'-O-methyl
  misc_feature (8)..(8): 2'-deoxy-2'Fluoro
  misc_feature (9)..(9): 2'-O-methyl
  misc_feature (10)..(10): 2'-deoxy-2'Fluoro
  misc_feature (11)..(14): 2'-O-methyl
  misc_feature (15)..(19): 2'-deoxy-2'Fluoro
  misc_feature (20)..(21): 2'-O-methyl
uucucuguacaaaacuucuuu

SEQ ID NO: 3540 - RNA, 21 nt, Artificial Sequence
  Description of Artificial Sequence: Target Sequence/siNA antisense region (stab36)
  misc_feature (4)..(6): 2'-deoxy-2'Fluoro
  misc_feature (7)..(7): 2'-O-methyl
  misc_feature (8)..(8): 2'-deoxy-2'Fluoro
  misc_feature (9)..(9): 2'-O-methyl
  misc_feature (10)..(10): 2'-deoxy-2'Fluoro
  misc_feature (11)..(14): 2'-O-methyl
  misc_feature (15)..(19): 2'-deoxy-2'Fluoro
  misc_feature (20)..(21): 2'-O-methyl
uucucuguacaaaacuucuca

SEQ ID NO: 3541 - RNA, 19 nt, Artificial Sequence
  Description of Artificial Sequence: Target Sequence/siNA sense region
auuaaaaaugaaauuauuu

SEQ ID NO: 3542 - RNA, 19 nt, Artificial Sequence
  Description of Artificial Sequence: Target Sequence/siNA antisense region
aaauaauuucauuuuuaau

SEQ ID NO: 3543 - DNA, 21 bp, Artificial Sequence
  Description of Artificial Sequence: Target Sequence/siNA sense region (stab00)
  misc_feature (1). .(19): ribonucleotide unmodified or modified as described for this sequence
auuaaaaaugaaauuauuutt

SEQ ID NO: 3544 - DNA, 21 bp, Artificial Sequence
  Description of Artificial Sequence: Target Sequence/siNA antisense region (stab00as)
  misc_feature (1). .(19): ribonucleotide unmodified or modified as described for this sequence
aaauaauuucauuuuuaautt

SEQ ID NO: 3545 - DNA, 21 bp, Artificial Sequence
  Description of Artificial Sequence: Target Sequence/siNA sense region (stab04)
  misc_feature (1)..(1): 5'-3 attached terminal deoxyabasic moiety, inverted abasic, inverted nucleotide or other terminal cap that is optionally present
  misc_feature (21)..(21): 3'-3 attached terminal deoxyabasic moiety, inverted abasic, inverted nucleotide or other terminal cap that is optionally present
  misc_feature (2)..(3): 2'-deoxy-2'Fluoro
  misc_feature (9)..(9): 2'-deoxy-2'Fluoro
  misc_feature (14)..(15): 2'-deoxy-2'Fluoro
  misc_feature (17)..(19): 2'-deoxy-2'Fluoro
  misc_feature (1). .(19): ribonucleotide unmodified or modified as described for this sequence
auuaaaaaugaaauuauuutt

SEQ ID NO: 3546 - DNA, 21 bp, Artificial Sequence
  Description of Artificial Sequence: Target Sequence/siNA antisense region (stab05)
  misc_feature (4)..(4): 2'-deoxy-2'Fluoro
  misc_feature (7)..(10): 2'-deoxy-2'Fluoro
  misc_feature (12)..(16): 2'-deoxy-2'Fluoro
  misc_feature (19)..(19): 2'-deoxy-2'Fluoro
  misc_feature (20)..(20): Phosphorothioate or Phosphorodithioate 3'-Internucleotide Linkage (optionally present)
  misc_feature (1). .(19): ribonucleotide unmodified or modified as described for this sequence
aaauaauuucauuuuuaautt

SEQ ID NO: 3547 - DNA, 21 bp, Artificial Sequence
  Description of Artificial Sequence: Target Sequence/siNA sense region (stab07)
  misc_feature (1)..(1): 5'-3 attached terminal deoxyabasic moiety, inverted abasic, inverted nucleotide or other terminal cap that is optionally present
  misc_feature (21)..(21): 3'-3 attached terminal deoxyabasic moiety, inverted abasic, inverted nucleotide or other terminal cap that is optionally present
  misc_feature (2)..(3): 2'-deoxy-2'Fluoro
  misc_feature (9)..(9): 2'-deoxy-2'Fluoro
  misc_feature (14)..(15): 2'-deoxy-2'Fluoro
  misc_feature (17)..(19): 2'-deoxy-2'Fluoro
  misc_feature (1). .(19): ribonucleotide unmodified or modified as described for this sequence
auuaaaaaugaaauuauuutt

SEQ ID NO: 3548 - DNA, 21 bp, Artificial Sequence
  Description of Artificial Sequence: Target Sequence/siNA antisense region (stab08)
  misc_feature (1)..(3): 2'-O-methyl
  misc_feature (4)..(4): 2'-deoxy-2'Fluoro
  misc_feature (5)..(6): 2'-O-methyl
  misc_feature (7)..(10): 2'-deoxy-2'Fluoro
  misc_feature (11)..(11): 2'-O-methyl
  misc_feature (12)..(16): 2'-deoxy-2'Fluoro
  misc_feature (17)..(18): 2'-O-methyl
  misc_feature (19)..(19): 2'-deoxy-2'Fluoro
  misc_feature (20)..(20): Phosphorothioate or Phosphorodithioate 3'-Internucleotide Linkage (optionally present)
  misc_feature (1). .(19): ribonucleotide unmodified or modified as described for this sequence
aaauaauuucauuuuuaautt

SEQ ID NO: 3549 - DNA, 21 bp, Artificial Sequence
  Description of Artificial Sequence: Target Sequence/siNA sense region (stab09)
  misc_feature (1)..(1): 5'-3 attached terminal deoxyabasic moiety, inverted abasic, inverted nucleotide or other terminal cap that is optionally present
  misc_feature (21)..(21): 3'-3 attached terminal deoxyabasic moiety, inverted abasic, inverted nucleotide or other terminal cap that is optionally present
  misc_feature (1). .(19): ribonucleotide unmodified or modified as described for this sequence
auuaaaaaugaaauuauuutt

SEQ ID NO: 3550 - DNA, 21 bp, Artificial Sequence
  Description of Artificial Sequence: Target Sequence/siNA antisense region (stab10)
  misc_feature (20)..(20): Phosphorothioate or Phosphorodithioate 3'-Internucleotide Linkage (optionally present)
  misc_feature (1). .(19): ribonucleotide unmodified or modified as described for this sequence
aaauaauuucauuuuuaautt

SEQ ID NO: 3551 - DNA, 21 bp, Artificial Sequence
  Description of Artificial Sequence: Target Sequence/siNA antisense region (stab19)
  misc_feature (21)..(21): 3'-3 attached terminal deoxyabasic moiety, inverted abasic, inverted nucleotide or other terminal cap that is optionally present
  misc_feature (1)..(3): 2'-O-methyl
  misc_feature (4)..(4): 2'-deoxy-2'Fluoro
  misc_feature (5)..(6): 2'-O-methyl
  misc_feature (7)..(10): 2'-deoxy-2'Fluoro
  misc_feature (11)..(11): 2'-O-methyl
  misc_feature (12)..(16): 2'-deoxy-2'Fluoro
  misc_feature (17)..(18): 2'-O-methyl
  misc_feature (19)..(19): 2'-deoxy-2'Fluoro
  misc_feature (1). .(19): ribonucleotide unmodified or modified as described for this sequence
aaauaauuucauuuuuaautt

SEQ ID NO: 3552 - DNA, 21 bp, Artificial Sequence
  Description of Artificial Sequence: Target Sequence/siNA antisense region (stab22)
  misc_feature (21)..(21): 3'-3 attached terminal deoxyabasic moiety, inverted abasic, inverted nucleotide or other terminal cap that is optionally present
  misc_feature (20)..(20): Phosphorothioate or Phosphorodithioate 3'-Internucleotide Linkage (optionally present)
  misc_feature (1). .(19): ribonucleotide unmodified or modified as described for this sequence
aaauaauuucauuuuuaautt

SEQ ID NO: 3553 - DNA, 21 bp, Artificial Sequence
  Description of Artificial Sequence: Target Sequence/siNA antisense region (stab25)
  misc_feature (4)..(4): 2'-deoxy-2'Fluoro
  misc_feature (5)..(6): 2'-O-methyl
  misc_feature (7)..(10): 2'-deoxy-2'Fluoro
  misc_feature (11)..(11): 2'-O-methyl
  misc_feature (12)..(16): 2'-deoxy-2'Fluoro
  misc_feature (17)..(18): 2'-O-methyl
  misc_feature (19)..(19): 2'-deoxy-2'Fluoro
  misc_feature (20)..(20): Phosphorothioate or Phosphorodithioate 3'-Internucleotide Linkage (optionally present)
  misc_feature (1). .(19): ribonucleotide unmodified or modified as described for this sequence
aaauaauuucauuuuuaautt

SEQ ID NO: 3554 - RNA, 21 nt, Artificial Sequence
  Description of Artificial Sequence: Target Sequence/siNA antisense region (stab35)
  misc_feature (4)..(4): 2'-deoxy-2'Fluoro
  misc_feature (5)..(6): 2'-O-methyl
  misc_feature (7)..(10): 2'-deoxy-2'Fluoro
  misc_feature (11)..(11): 2'-O-methyl
  misc_feature (12)..(16): 2'-deoxy-2'Fluoro
  misc_feature (17)..(18): 2'-O-methyl
  misc_feature (19)..(19): 2'-deoxy-2'Fluoro
  misc_feature (20)..(21): 2'-O-methyl
aaauaauuucauuuuuaauuu

SEQ ID NO: 3555 - RNA, 21 nt, Artificial Sequence
  Description of Artificial Sequence: Target Sequence/siNA antisense region (stab36)
  misc_feature (4)..(4): 2'-deoxy-2'Fluoro
  misc_feature (5)..(6): 2'-O-methyl
  misc_feature (7)..(10): 2'-deoxy-2'Fluoro
  misc_feature (11)..(11): 2'-O-methyl
  misc_feature (12)..(16): 2'-deoxy-2'Fluoro
  misc_feature (17)..(18): 2'-O-methyl
  misc_feature (19)..(19): 2'-deoxy-2'Fluoro
  misc_feature (20)..(21): 2'-O-methyl
aaauaauuucauuuuuaauuc

SEQ ID NO: 3556 - RNA, 4284 nt, Homo sapiens
agcagagcugcggccgggggaacccaguuuccgaggaacuuuucgccggcgccgggccgccucugaggccagggcaggacacgaacgcgcggagcggcggcggcgacugagagccggggccgcggcggcgcucccuaggaagggccguacgaggcggcgggcccggcgggccucccggaggaggcggcugcgccauggacgagccacccuucagcgaggcggcuuuggagcaggcgcugggcgagccgugcgaucuggacgcggcgcugcugaccgacaucgaaggugaagucggcgcggggagggguagggccaacggccuggacgccccaagggcgggcgcagaucgcggagccauggauugcacuuucgaagacaugcuucagcuuaucaacaaccaagacagugacuucccuggccuauuugacccacccuaugcugggaguggggcagggggcacagacccugccagccccgauaccagcuccccaggcagcuugucuccaccuccugccacauugagcuccucucuugaagccuuccugagcgggccgcaggcagcgcccucaccccuguccccuccccagccugcacccacuccauugaagauguacccguccaugcccgcuuucuccccugggccugguaucaaggaagagucagugccacugagcauccugcagacccccaccccacagccccugccaggggcccuccugccacagagcuucccagccccagccccaccgcaguucagcuccaccccuguguuaggcuaccccagcccuccgggaggcuucucuacaggaagcccucccgggaacacccagcagccgcugccuggccugccacuggcuuccccgccaggggucccgcccgucuccuugcacacccagguccagaguguggucccccagcagcuacugacagucacagcugcccccacggcagccccuguaacgaccacugugaccucgcagauccagcaggucccgguccugcugcagccccacuucaucaaggcagacucgcugcuucugacagccaugaagacagacggagccacugugaaggcggcaggucucaguccccuggucucuggcaccacugugcagacagggccuuugccgacccuggugaguggcggaaccaucuuggcaacagucccacuggucguagaugcggagaagcugccuaucaaccggcucgcagcuggcagcaaggccccggccucugcccagagccguggagagaagcgcacagcccacaacgccauugagaagcgcuaccgcuccuccaucaaugacaaaaucauugagcucaaggaucugguggugggcacugaggcaaagcugaauaaaucugcugucuugcgcaaggccaucgacuacauucgcuuucugcaacacagcaaccagaaacucaagcaggagaaccuaagucugcgcacugcuguccacaaaagcaaaucucugaaggaucuggugucggccuguggcaguggagggaacacagacgugcucauggagggcgugaagacugagguggaggacacacugaccccaccccccucggaugcuggcucaccuuuccagagcagccccuugucccuuggcagcaggggcaguggcagcgguggcaguggcagugacucggagccugacagcccagucuuugaggacagcaaggcaaagccagagcagcggccgucucugcacagccggggcaugcuggaccgcucccgccuggcccugugcacgcucgucuuccucugccuguccugcaaccccuuggccuccuugcugggggcccgggggcuucccagccccucagauaccaccagcgucuaccauagcccugggcgcaacgugcugggcaccgagagcagagauggcccuggcugggcccaguggcugcugcccccaguggucuggcugcucaaugggcuguuggugcucgucuccuuggugcuucucuuugucuacggugagccagucacacggccccacucaggccccgccguguacuucuggaggcaucgcaagcaggcugaccuggaccuggcccggggagacuuugcccaggcugcccagcagcuguggcuggcccugcgggcacugggccggccccugcccaccucccaccuggaccuggcuuguagccuccucuggaaccucauccgucaccugcugcagcgucucugggugggccgcuggcuggcaggccgggcagggggccugcagcaggacugugcucugcgaguggaugcuagcgccagcgcccgagacgcagcccuggucuaccauaagcugcaccagcugcacaccauggggaagcacacaggcgggcaccucacugccaccaaccuggcgcugagugcccugaaccuggcagagugugcaggggaugccgugucuguggcgacgcuggccgagaucuauguggcggcugcauugagagugaagaccagucucccacgggccuugcauuuucugacacgcuucuuccugagcagugcccgccaggccugccuggcacagaguggcucagugccuccugccaugcaguggcucugccaccccgugggccaccguuucuucguggauggggacugguccgugcucaguaccccaugggagagccuguacagcuuggccgggaacccaguggacccccuggcccaggugacucagcuauuccgggaacaucucuuagagcgagcacugaacugugugacccagcccaaccccagcccugggucagcugauggggacaaggaauucucggaugcccucggguaccugcagcugcugaacagcuguucugaugcugcgggggcuccugccuacagcuucuccaucaguuccagcauggccaccaccaccggcguagacccgguggccaaguggugggccucucugacagcuguggugauccacuggcugcggcgggaugaggaggcggcugagcggcugugcccgcugguggagcaccugccccgggugcugcaggagucugagagaccccugcccagggcagcucugcacuccuucaaggcugcccgggcccugcugggcugugccaaggcagagucugguccagccagccugaccaucugugagaaggccaguggguaccugcaggacagccuggcuaccacaccagccagcagcuccauugacaaggccgugcagcuguuccugugugaccugcuucuuguggugcgcaccagccuguggcggcagcagcagcccccggccccggccccagcagcccagggcaccagcagcaggccccaggcuuccgcccuugagcugcguggcuuccaacgggaccugagcagccugaggcggcuggcacagagcuuccggcccgccaugcggaggguguuccuacaugaggccacggcccggcugauggcgggggccagccccacacggacacaccagcuccucgaccgcagucugaggcggcgggcaggccccgguggcaaaggaggcgcgguggcggagcuggagccgcggcccacgcggcgggagcacgcggaggccuugcugcuggccuccugcuaccugccccccggcuuccugucggcgcccgggcagcgcgugggcaugcuggcugaggcggcgcgcacacucgagaagcuuggcgaucgccggcugcugcacgacugucagcagaugcucaugcgccugggcggugggaccacugucacuuccagcuagaccccguguccccggccucagcaccccugucucuagccacuuuggucccgugcagcuucuguccugcgucgaagcuuugaaggccgaaggcagugcaagagacucuggccuccacaguucgaccugcggcugcugugugccuucgcgguggaaggcccgaggggcgcgaucuugacccuaagaccggcggccaugauggugcugaccucugguggccgaucggggcacugcaggggccgagccauuuuggggggccccccuccuugcucugcaggcaccuuaguggcuuuuuuccuccuguguacagggaagagagggguacauuucccugugcugacggaagccaacuuggcuuucccggacugcaagcagggcucugccccagaggccucucucuccgucgugggagagagacguguacauaguguaggucagcgugcuuagccuccugaccugaggcuccugugcuacuuugccuuuugcaaacuuuauuuucauagauugagaaguuuuguacagagaauuaaaaaugaaauuauuuauaaucuggaaaaaa
